(19) United States
(12) Patent Application Publication
(10) Pub. No.: US 2005/0266420 A1
(43) Pub. Date: Dec. 1, 2005

(54) Multigene predictors of response to chemotherapy

(75) Inventors: Lajos Pusztai, Pearland, TX (US); W. Fraser Symmans, Houston, TX (US); Kenneth R. Hess, Houston, TX (US); Mark Ayers, Pennington, NJ (US); James Stec, Plymouth, MA (US)

Correspondence Address: Charles P. Landrum;Fulbright & Jaworski L.L.P., Suite 2400, 600 Congress Avenue, Austin, TX, 78701, US

(73) Assignees: Board of Regents, The University of Texas System; Millenium Pharmaceuticals, Inc.

(21) Appl. No.: 10/955,054

(22) Filed: Sep. 30, 2004

Related U.S. Application Data
(60) Provisional application No. 60/575,308, filed on May 28, 2004.

(51) Int. Cl. C12Q 1/68; G06F 19/00; G01N 33/48; G01N 33/50

(52) U.S. Cl. 435/6; 702/19; 702/20

(57) ABSTRACT

The present invention provides the identification of genes that are expressed in tumors that are responsive to a given therapeutic agent and whose expression (either increased expression or decreased expression) correlates with responsiveness to that therapeutic agent. One or more of the genes of the present invention can be used as markers (or surrogate markers) to identify tumors that are likely to be successfully treated by that agent.

[0001] This application claims priority to U.S. Provisional Patent application Ser. No. 60/575,308, filed on May 28, 2004, entitled “Multigene Predictors of Response to Chemotherapy,” which is incorporated herein by reference in its entirety.

### BACKGROUND OF THE INVENTION

[0002] 1. Field of the Invention

[0003] The present invention relates generally to the field of cancer biology. More particularly, it concerns gene expression profiles that are indicative of the responsiveness of a cancer to therapy. In specific embodiments, the invention concerns gene expression profiles in paclitaxel/5-fluorouracil (5-FU), doxorubicine, and cyclophosphamide (P/FAC)-sensitive and P/FAC-resistant cancer.

[0004] 2. Description of Related Art

[0005] Cancers can be viewed as a breakdown in the communication between tumor cells and their environment, including their normal neighboring cells. Normally, cells do not divide in the absence of stimulatory signals or in the presence of inhibitory signals. In a cancerous or neoplastic state, a cell acquires the ability to “override” these signals and to proliferate under conditions in which a normal cell would not.

[0006] In general, tumor cells must acquire a number of distinct aberrant traits in order to proliferate in an abnormal manner. Reflecting this requirement is the fact that the genomes of certain well-studied tumors carry several different independently altered genes, including activated oncogenes and inactivated tumor suppressor genes. In addition to abnormal cell proliferation, cells must acquire several other traits for tumor progression to occur. For example, early on in tumor progression, cells must evade the host immune system. Further, as tumor mass increases, the tumor must acquire vasculature to supply nourishment and remove metabolic waste. Additionally, cells must acquire an ability to invade adjacent tissue. In many cases cells ultimately acquire the capacity to metastasize to distant sites.

[0007] It is apparent that the complex process of tumor development and growth must involve multiple gene products. It is therefore important to identify the genes and gene products that can serve as targets for the diagnosis, prevention and treatment of cancers. Historically, research has focused on exploring the prognostic or predictive value of individual molecules expressed by human cancers. The general approach has been to take a biologically important molecule and examine whether its presence or absence correlates with clinical outcome. Unfortunately, the association of putative markers with clinical outcome is often weak and is rarely independent of other clinical characteristics, which limits its usefulness in clinical decision making.

[0008] The limited utility of individual molecules to predict clinical outcome of cancer may be due to the incomplete understanding of the function of these markers. In addition, biologically important molecules act in concert and form complex, interactive pathways where an individual molecule may only contribute limited information on the functional activity of a whole pathway. The promise of microarray technology is that by assessing the transcriptional activity of a large number of genes, the complex gene-expression profile may contain more information than any individual molecule that contributes to it.

[0009] There are examples indicating that the molecular classification of cancer based on gene-expression profiles is possible. Unsupervised clustering of breast cancer specimens consistently separated tumors into ER⁺ and ER⁻ clusters (Perou et al., 2000; Pusztai et al., 2003; Gruvberger et al., 2001). Analysis of gene-expression profiles also distinguished sporadic breast cancers from breast cancer gene, BRCA, mutant cases (Hedenfalk et al., 2001).

[0010] Transcriptional profiles also revealed previously unrecognized molecular subgroups within existing histological categories in breast cancer (Perou et al., 2000), diffuse large-B-cell lymphoma, and soft tissue and central nervous system embryonal tumors (Nielsen et al., 2002; Pomeroy et al., 2002). In addition, gene-expression profiles have been shown to predict survival of patients with node-negative breast cancer (van't Veer et al., 2002; van de Vijver et al., 2002), lymphoma (Alizadeh et al., 2000; Rosenwald, 2002), renal cancer (Takahashi et al., 2001), and lung cancer (Beer et al., 2002).

[0011] Another possible clinical application of microarray technology is in predicting a patient's response to anti-cancer therapy. The number of anti-cancer drugs and multi-drug combinations has increased substantially in the past decade, however, treatments continue to be applied empirically using a trial-and-error approach. Clinical experience shows that some tumors are sensitive to several different types of chemotherapeutic agents, while other cancers of the same histology show selective sensitivity to certain drugs but resistance to others. A test that could assist physicians to select the optimal chemotherapy from several alternative treatment options would be an important clinical advance.

### SUMMARY OF THE INVENTION

[0012] Embodiments of the invention include methods for assessing the responsiveness of a tumor to therapy. In certain embodiments the methods comprise obtaining a sample of a tumor from a patient; evaluating the sample for expression of one or more markers identified in Table 1; and assessing the responsiveness of the tumor to therapy based on the evaluation of marker expression in the sample. Marker refers to a gene or gene product (RNA or polypeptide) whose expression is related to response of a cancer to a therapy, either a positive (complete pathological response) or a negative response (residual disease). Expression of a marker may be assessed by detecting polynucleotides or polypeptides derived therefrom. In particular emobodiments, the marker is the nucleic acid encoding the microtubule-associated protein Tau or the encoded Tau polypeptide. In certain aspects, the tumor may be classified as sensitive when the therapy achieves an outcome of a complete pathological response or the gene expression profiles predicts that a tumor will have some probability of a complete pathological response. In still further aspects of the invention, the chance of a complete pathological response in a patient's tumor may be 35, 40, 45, 50, 55, 60, 65, 70, 80, 90, 95% or any value therebetween. In other aspects, the tumor may be classified as resistant to therapy, when the therapy does not achieve an outcome of a significant pathological response or the gene expression profiles predicts that a tumor will have some probability that the response will not achieve a pathological response. In still further aspects of the invention, the chance of a complete pathological response in a resistant cell may be 30, 25, 20, 15, 10% or less, including any value therebetween.

[0013] In certain embodiments, the therapy is a chemotherapy, and preferably P/FAC therapy. In certain aspects of the invention, evaluating the expression (gene expression profile) of the one or more markers comprises using a prediction algorithm. In further embodiments, the algorithm is k-nearest neighbor, support vector machines, diagonal linear discriminant analyses, or compound co-variate predictor, preferably a k-nearest neighbor algorithm. In certain aspects, a k-nearest neighbor algorithm will have, for example, a k value of 1, 2, 3, 4, 5, 6, 7, 8, 9, 10, 11, 12, 13, 14, 15, 16, 17, 18, 19, or 20. In preferred embodiments k=7.

[0014] In certain aspects of the invention, the tumor comprises breast cancer. In still other aspects the tumor is sampled by aspiration, biopsy, or surgical resection. Embodiments of the invention include assessing the expression of the one or more markers by detecting a mRNA derived from one or more markers. In a preferred embodiment, detection comprises microarray analysis, and more preferably the microarray is an Affymetrix Gene Chip. In other aspects of the invention, detection comprises nucleic acid amplification, preferably PCR. In still further aspects, detection is by in situ hybridization. In further embodiments, assessing the expression of one or more markers is by detecting a protein derived from a gene identified as a marker. A protein may be detected by immunohistochemistry, western blotting, or other known protein detection means.

[0015] In still a further embodiment includes methods of monitoring a cancer patient receiving a chemotherapy, preferably P/FAC therapy. Methods of monitoring a cancer patient comprise obtaining a tumor sample from the patient during chemotherapy; evaluating expression of one or more markers of Table 1 in the tumor sample; and assessing the cancer patient's responsiveness to chemotherapy, e.g., P/FAC therapy. A tumor sample may be obtained, evaluated and assessed repeatedly at various time points during chemotherapy.

[0016] Accordingly, in certain aspects it would be useful to identify genes and/or gene products that represent prognostic genes with respect to the response to a given therapeutic agent or class of therapeutic agents. It then may be possible to determine which patients will benefit from particular therapeutic regimen and, importantly, determine when, if ever, the therapeutic regime begins to lose its effectiveness for a given patient. The ability to make such predictions would make it possible to discontinue a therapeutic regime that has lost its effectiveness well before its loss of effectiveness becomes apparent by conventional measures.

[0017] In yet other embodiments include methods of assessing anti-cancer activity of a candidate substance. The methods comprise contacting a first cancer cell with a candidate substance; comparing expression of one or more markers in Table 1 in a first cancer cell exposed to a candidate substance with expression of the markers in a second cancer cell not contacted with the candidate substance; and assessing the anti-cancer activity of the candidate substance. Anti-cancer activity can be the sensitization of a cancer cell to therapy, which may be evaluated by gene expression profiles. In certain aspects, the therapy is a chemotherapy, preferably the chemotherapy is P/FAC therapy. For example, the anticancer efficacy of trastuzumab may be assessed as well as its ability to increase the sensitivity of cancer to chemotherapy (U.S. Pat. Nos. 6,399,063; 6,387,371; 6,165,464; 5,772,997; and 5,677,171, each of which is incorporated herein by reference in its entirety).

[0018] It is contemplated that any method or composition described herein can be implemented with respect to any other method or composition described herein.

[0019] The use of the term “or” in the claims is used to mean “and/or” unless explicitly indicated to refer to alternatives only or the alternatives are mutually exclusive, although the disclosure supports a definition that refers to only alternatives and “and/or.”

[0020] Throughout this application, the term “about” is used to indicate that a value includes the standard deviation of error for the device or method being employed to determine the value.

[0021] Following long-standing patent law, the words “a” and “an,” when used in conjunction with the word “comprising” in the claims or specification, denotes one or more, unless specifically noted.

[0022] Other objects, features and advantages of the present invention will become apparent from the following detailed description. It should be understood, however, that the detailed description and the specific examples, while indicating specific embodiments of the invention, are given by way of illustration only, since various changes and modifications within the spirit and scope of the invention will become apparent to those skilled in the art from this detailed description.

### BRIEF DESCRIPTION OF THE DRAWINGS

[0023] The following drawings form part of the present specification and are included to further demonstrate certain aspects of the present invention. The invention may be better understood by reference to one or more of these drawings in combination with the detailed description of specific embodiments presented herein.

[0024] FIG. 1 illustrates a dot plot of the fully cross-validated misclassification results for the DLDA classifier with 30 genes over the 100 iterations for 2-, 5-, 7-, 10-, 15-, 20-, 40- and 82-fold cross-validation.

[0025] FIG. 2 illustrates the Area Above the ROC curves (AAC) results for 2-fold CV plotting against the number of top genes included. Data for 14 classifier methods with different numbers of genes included (39 subset sizes) are shown (means over the 100 iterations). Horizontal dotted lines indicate the mean+/−2 SD for the DLDA classifier with 30 genes.

[0026] FIG. 3 illustrates Misclassification Error Rates (MER) for 2-fold CV plotted against the number of top genes included. Data for 14 classifiers and 39 gene subset sizes are shown (means over the 100 iterations). Horizontal lines are drawn at the mean+/−2 SD for DLDA with 30 genes.

[0027] FIG. 4 illustrates Area Above the ROC curves (AAC) results for 5-fold CV plotted against the number of top genes included. Data for 14 classifiers and 39 gene subset sizes are shown (means over the 100 iterations). Horizontal lines are drawn at the mean+/−2 SD for DLDA with 30 genes.

[0028] FIGS. 5A-5C. show microtubule associated protein Tau mRNA expression measured by Affymetrix U133A chip in 60 breast cancer patients. (FIG. 5A) The location of the target sequences for the 4 distinct Affymetrix probe sets is shown along the Tau cDNA (FIG. 5B) Heat map of Tau expression in each of the specimens. Each column represents a patient sample; each row represents a probe set. High and low expression are typically color coded in red and green, respectively. (FIG. 5C) Tau mRNA expression measured by each of the 4 probe sets is significantly lower in the cohort of patients with pathological CR compared to those with residual disease (Mann-Whitney test).

[0029] FIGS. 6A-6F. illustrated validation of Tau expression by immunohistochemistry on a tissue-array from an independent set of patients who received similar preoperative chemotherapy (n=122). FIG. 6A illustrates Tau protein expression in normal breast epithelial cells and blood vessels, (FIG. 6B) shows weak 1+, (FIG. 6C) moderate 2+, and (FIG. 6D) strong 3+ staining in invasive tumor cells (Magnification ×40). The patient represented in FIG. 6B achieved a pathologic CR whereas the patient with the tumor represented in FIG. 6D had extensive residual disease. The bar graphs (FIG. 6E) show the proportion of patients with pathological CR and residual disease among Tau-positive and Tau-negative cases, respectively (chi-square test). Forty-four % of Tau-negative patients had pathological CR compared to 17% of Tau-positive cases. (FIG. 6F) Multivariate analysis of predictive factors for pathological CR identified higher nuclear grade, younger age and Tau-negative status as significant independent predictors of pathological CR (logistic regression analysis).

[0030] FIGS. 7A-7D. illustrate the effect of Tau down regulation on the sensitivity of ZR75.1 breast cancer cells to paclitaxel and epirubicin. (FIG. 7A) Twelve breast cancer cell lines were screened for Tau expression by Western-Blot and 4 cell lines were positive. (FIG. 7B) Tau protein expression was down regulated in ZR75.1 cells by Tau siRNA transfection in a time dependent manner. (FIGS. 7C and 7D) Dose response curves of parental, lamin siRNA and Tau siRNA transfected ZR75.1 cells after 48 H exposure to paclitaxel or epirubicin. ATP assay results of triplicate experiments and 95% confidence intervals are plotted. Tau siRNA increases sensitivity to paclitaxel but not to epirubicin.

[0031] FIGS. 8A-8G. show fluorescent paclitaxel uptake by Tau knock down cells. FACS analysis of ZR75.1 cells transfected with lamin siRNA (FIG. 8A) and Tau siRNA (FIG. 8B), after exposure to Oregon green fluorescent paclitaxel. (FIG. 8C) Percentage of cells with >10 arbitrary fluorescent units at 20, 50 and 80 minutes after incubation with 1 μM fluorescent paclitaxel. Cells transfected with Tau siRNA show increased percentage of fluorescent cells compared to control or lamin siRNA transfected cells. FACS analysis of spontaneously fluorescent epirubicin uptake in lamin knocked-down (FIG. 8D) and Tau knocked-down cells (FIG. 8E). Fluorescent microscopy showing that fluorescent paclitaxel is located in the cytoplasm (FIG. 8F) and also binds to the mitotic spindle during anaphase (FIG. 8G) in cells with low Tau-expression.

[0032] FIGS. 9A-9C. illustrates that Tau partially protects tubulin from paclitaxel-induced polymerization in vitro. Effects of paclitaxel and Tau and the combination of the two on microtubule polymerization. Tubulin (20 μM) and GTP buffer were incubated at 37° C. alone (x) or with 20 μM paclitaxel (o), 15 μM microtubule associated protein Tau (▪), or 20 μM paclitaxel and 15 ∝M microtubule associated protein Tau (●) for 30 min. Polymerization is measured as increasing optical density (A340) at 30-second intervals. (FIG. 9A) Simultaneous exposure to paclitaxel and Tau augmented tubulin polymerisation. (FIG. 9B) Pre-incubation of tubulin with Tau decreased paclitaxel-induced microtubule polymerisation. Tubulin was incubated with 2 concentrations of Tau (15 μM or 7.5 μM) at 37° C. for 30 minutes before adding paclitaxel (20 μM). Tau decreased the paclitaxel-induced polymerisation in a dose-dependent manner. (FIG. 9C) Competition between Tau and paclitaxel binding to tubulin was assessed using fluorescent paclitaxel. Tubulin was incubated directly with 5 μM of fluorescent paclitaxel or it was pre-incubated with regular paclitaxel (20 μM) or microtubule associated protein Tau (15 μM) for 30 minutes before fluorescent paclitaxel was added. Tubulin-bound fluorescence was measured and indicated reduced fluorescence in the presence of regular paclitaxel or Tau. This demonstrates that preincubation with Tau reduces the ability of paclitaxel to bind to tubulin.

### DESCRIPTION OF ILLUSTRATIVE EMBODIMENTS

[0033] Currently, there are at least 4 commonly used pre- or post-operative chemotherapy regimens for stage I-III breast cancers. Prior to the present invention, there were few tests to select the best regimen for an individual prior to the start of chemotherapy. Typically, treatments were evaluated empirically using a trial-and-error approach. Complete pathologic eradication of breast cancer from the breast (and regional lymph nodes) predicts cure with high accuracy. However, this endpoint is only available after completion of the empirically selected chemotherapy. In the case of P/FAC chemotherapy, the course of treatment last 6 months, and only between 15-30% of the patients achieve a pathological complete response (pCR).

[0034] The ability to choose an appropriate treatment at the outset may make the difference between cure and recurrence of a cancer, such as breast cancer. The present invention provides for the identification of patients who are the most likely to benefit from a therapy, such as P/FAC chemotherapy, by assessing the differential expression of one or more of the responsiveness genes in a tumor sample from a patient. In one example, it is estimated that an individual will experience complete pathological response to P/FAC therapy with an estimated 66% positive predictive value. A predictive value as used herein is the percentage of patients predicted to have a certain therapeutic outcome that do actually have the predicted therapeutic outcome. A therapeutic outcome may range from cure to no benefit and may include the slowing of tumor growth, a reduction in tumor burden, eradication of the tumor as determined by pathology, and other therapeutic outcomes. This represents a doubling of the chance of achieving complete pathological response (and likely cure) from P/FAC chemotherapy from 15-30% in untested patients to 66% in patients who would be selected to receive P/FAC chemotherapy on the basis of the proposed test results, using this example of the inventive methods. For these patients a P/FAC regimen represents the best chance of cure over the unselected use of treatments. Such predictive test can be used to select patients for this treatment regimen either as pre- or postoperative treatment. These genes alone or in combination may also be used as therapeutic targets to develop novel drugs against breast cancer or to modulate and increase the activity of existing therapeutic agents.

[0035] The expression level of a set or subset of identified responsiveness gene(s), or the proteins encoded by the responsive genes, may be used to: 1) determine if a tumor can be or is likely to be successfully treated by an agent or combination of agents; 2) determine if a tumor is responding to treatment with an agent or combination of agents; 3) select an appropriate agent or combination of agents for treating a tumor; 4) monitor the effectiveness of an ongoing treatment; and 5) identify new treatments (either single agent or combination of agents). In particular, the identified responsiveness genes may be utilized as markers (surrogate and/or direct) to determine appropriate therapy, to monitor clinical therapy and human trials of a drug being tested for efficacy, and to develop new agents and therapeutic combinations.

[0036] In certain embodiments, methods and compositions include genes (markers) that are expressed in cancer cells responsive to a given therapeutic agent and whose expression (either increased expression or decreased expression) correlates with responsiveness to a therapeutic agent, see Table 1. A “responsiveness gene” or “gene marker” as used herein is a gene whose increased expression or decreased expression is correlated with a cell's response to a particular therapy. A response may be either a therapeutic response (sensitivity) or a lack of therapeutic response (residual disease, which may indicate resistance). Accordingly, one or more of the genes of the present invention can be used as markers (or surrogate markers) to identify tumors and tumor cells that are likely to be successfully treated by a therapeutic agent(s). In addition, the markers of the present invention can be used to identify cancers that have become or are at risk of becoming refractory to a treatment. Aspects of the invention include marker sets that can identify patients that are likely to respond or not to respond to a therapy.

[0037] In still further embodiments, the invention is directed to methods of treating or sensitizing a tumor in an individual to chemotherapy. These methods may comprise the steps of: administering to the individual an agent that reduces the level of a gene whose down regulation is associated with pCR, e.g., Tau; thus sensitizing the tumor to chemotherapeutic agent such as paclitaxel; and administering an effective amount of a chemotherapeutic agent, such as paclitaxel. This method would be generally used to treat tumors which are resistant to chemotherapy, including breast tumors, glioblastomas, medulloblastomas, pancreatic adenocarcinomas, lung carcinomas, melanomas, and the like.

[0038] As used herein, cancer cells, including tumor cells, are “responsive” to a therapeutic agent if its rate of growth is inhibited or the tumor cells die as a result of contact with the therapeutic agent, compared to its growth in the absence of contact with the therapeutic agent. The quality of being responsive to a therapeutic agent is a variable one, with different tumors exhibiting different levels of “responsiveness” to a given therapeutic agent, under different conditions. In one embodiment of the invention, tumors may be predisposed to responsiveness to an agent if one or more of the corresponding responsiveness markers are expressed.

[0039] Cancer, including tumor cells, are “non-responsive” to a therapeutic agent if its rate of growth is not inhibited (or inhibited to a very low degree) or cell death is not induced as a result of contact with the therapeutic agent, compared to its growth in the absence of contact with the therapeutic agent. The quality of being non-responsive to a therapeutic agent is a highly variable one, with different tumors exhibiting different levels of “non-responsiveness” to a given therapeutic agent, under different conditions.

[0040] As used herein, cancers, including tumor cells, refer to neoplastic or hyperplastic cells. Cancers include, but is not limited to, carcinomas, such as squamous cell carcinoma, basal cell carcinoma, sweat gland carcinoma, sebaceous gland carcinoma, adenocarcinoma, papillary carcinoma, papillary adenocarcinoma, cystadenocarcinoma, medullary carcinoma, undifferentiated carcinoma, bronchogenic carcinoma, melanoma, renal cell carcinoma, hepatoma-liver cell carcinoma, bile duct carcinoma, cholangiocarcinoma, papillary carcinoma, transitional cell carcinoma, choriocarcinoma, semonoma, embryonal carcinoma, mammary carcinomas, gastrointestinal carcinoma, colonic carcinomas, bladder carcinoma, prostate carcinoma, and squamous cell carcinoma of the neck and head region; sarcomas, such as fibrosarcoma, myxosarcoma, liposarcoma, chondrosarcoma, osteogenic sarcoma, chordosarcoma, angiosarcoma, endotheliosarcoma, lymphangiosarcoma, synoviosarcoma and mesotheliosarcoma; leukemias and lymphomas such as granulocytic leukemia, monocytic leukemia, lymphocytic leukemia, malignant lymphoma, plasmocytoma, reticulum cell sarcoma, or Hodgkins disease; and tumors of the nervous system including glioma, meningoma, medulloblastoma, schwannoma or epidymoma.

[0041] In certain embodiments, 193 responsiveness genes are identified that are differentially expressed between cancer cells sensitive to chemotherapy and those that are less sensitive. These responsiveness genes were identified by comprehensive gene expression profiling on fine needle aspiration specimens from human breast cancers obtained at the time of diagnosis. The set of or subsets of the 193 responsiveness genes may be used to assess the responsiveness of a cancer cell or tumor to a therapy. In certain embodiments, the set or a subset of responsiveness genes, in combination with a prediction algorithm, can be used to identify patients who have a better than average probability to experience a pathologic complete response (pCR) to a therapy, preferably chemotherapy, and more preferably P/FAC therapy. A set or subset of responsiveness genes may include 1, 2, 5, 10, 15, 20, 25, 30, 35, 40, 45, 50, 55, 60, 65, 70, 75, 80, 85, 90, 95, 100, 105, 110, 115, 120, 125, 130, 135, 140 145, 150, 155, 160, 165, 170, 175, 180, 185, 190, or 193 responsiveness gene(s), or any number of responsiveness genes therebetween. The responsiveness genes are set forth in SEQ ID NOs: 1-193. Typically, the genes represented by SEQ ID NO:1-87, 160, 169, and 179 are under-expressed (down regulated) in cancers with complete pathological response, whereas, SEQ ID NO:88-159, 161-168, 170-178, and 180-193 are typically genes that are over-expressed (up-regulated) in cancers with complete pathological response.

I. Analysis of Gene Expression

[0042] The present invention provides methods for determining whether a cancer is likely to be sensitive or resistant to a particular therapy or regimen. Although microarray analysis determines the expression levels of thousands of genes in a sample, only a subset of these genes are significantly differentially expressed between cells having different outcomes to therapy. Identifying which of these differentially expressed genes can be used to predict a clinical outcome requires additional analysis.

[0043] The genes described in the present invention are genes whose expression varies by a predetermined amount between tumors that are sensitive to a chemotherapy, e.g., P/FAC, versus those that are not responsive or less responsive to a chemotherapy. The following provides detailed descriptions of the genes of interest in the present invention. It is noted that homologs and polymorphic variants of the genes are also contemplated. As described herein, the relative expression of these genes may be measured through nucleic acid hybridization, e.g., microarray analysis. However, other methods of determining expression of the genes are also contemplated. It is also noted that probes for the following genes may be designed using any appropriate fragment of the full lengths of the nucleic acids sequences set forth in SEQ ID NO: 1-193.

[0044] Gene expression data may be gathered in any way that is available to one of skill in the art. Typically, gene expression data is obtained by employing an array of probes that hybridize to several, and even thousands or more different transcripts. Such arrays are often classified as microarrays or macroarrays depending on the size of each position on the array.

[0045] In one embodiment, the present invention provides methods wherein nucleic acid probes are immobilized on a solid support in an organized array. Oligonucleotides can be bound to a support by a variety of processes, including lithography. It is common in the art to refer to such an array as a “chip.”

[0046] In one embodiment, gene expression is assessed by (1) providing a pool of target nucleic acids derived from one or more target genes; (2) hybridizing the nucleic acid sample to an array of probes (including control probes); and (3) detecting nucleic acid hybridization and assessing a relative expression (transcription) level.

TABLE 1
Top 193 Responsiveness Genes

| | | | | T-stat | |
|---|---|---|---|---|---|
| | Accession | | | (MeanCR- | |
| Probe.Set | SEQ ID NO | LocusLink | Name | MeanNR)/se | P-val |
| 203930_s_at | NM_016835.1 | 4137 | Microtubule- | −6.42 | 5.25 × 10⁻⁰⁸ |
| | SEQ ID NO: 1 | | associated protein | | |
| 212745_s_at | AI813772 | 585 | Bardet-Biedl | −6.25 | 9.40 × 10⁻⁰⁸ |
| | SEQ ID NO: 2 | | syndrome 4 | | |
| 203928_x_at | NM_016835.1 | 4137 | Microtubule- | −5.99 | 2.70 × 10⁻⁰⁷ |
| | SEQ ID NO: 1 | | associated protein | | |
| 206401_s_at | J03778.1 | 4137 | Microtubule- | −5.73 | 7.02 × 10⁻⁰⁷ |
| | SEQ ID NO: 3 | | associated protein | | |
| 203929_s_at | NM_016835.1 | 4137 | Microtubule- | −5.52 | 1.26 × 10⁻⁰⁶ |
| | SEQ ID NO: 1 | | associated protein | | |
| 212207_at | AK023837.1 | 23389 | KIAA1025 protein | −5.37 | 2.21 × 10⁻⁰⁶ |
| | SEQ ID NO: 4 | | | | |
| 212046_x_at | X60188.1 | 5595 | Mitogen-activated | −5.33 | 3.43 × 10⁻⁰⁶ |
| | SEQ ID NO: 5 | | protein kinas | | |
| 210469_at | BC002915.1 | 9231 | Discs, large | −5.28 | 3.53 × 10⁻⁰⁶ |
| | SEQ ID NO: 6 | | (Drosophila) homol | | |
| 205074_at | NM_003060.1 | 6584 | Solute carrier | −5.13 | 5.45 × 10⁻⁰⁶ |
| | SEQ ID NO: 7 | | family 22 (organ | | |
| 204509_at | NM_017689.1 | 54837 | Hypothetical protein | −5.02 | 6.15 × 10⁻⁰⁶ |
| | SEQ ID NO: 8 | | FLJ20151 | | |
| 205696_s_at | NM_005264.1 | 2674 | GDNF family | −5.00 | 1.06 × 10⁻⁰⁵ |
| | SEQ ID NO: 9 | | receptor alpha 1 | | |
| 219741_x_at | NM_024762.1 | 79818 | Hypothetical protein | −4.94 | 1.00 × 10⁻⁰⁵ |
| | SEQ ID NO: 10 | | FLJ21603 | | |
| 215616_s_at | AB020683.1 | 23030 | KIAA0876 protein | −4.86 | 1.43 × 10⁻⁰⁵ |
| | SEQ ID NO: 11 | | | | |
| 208945_s_at | NM_003766.1 | 8678 | Beclin 1 (coiled- | −4.86 | 1.48 × 10⁻⁰⁵ |
| | SEQ ID NO: 12 | | coil, myosin-1 | | |
| 217542_at | BE930512 | | ESTs | −4.80 | 1.84 × 10⁻⁰⁵ |
| | SEQ ID NO: 13 | | | | |
| 202204_s_at | AF124145.1 | 267 | Autocrine motility | −4.74 | 2.05 × 10⁻⁰⁵ |
| | SEQ ID NO: 14 | | factor recep | | |
| 204916_at | NM_005855.1 | 10267 | Receptor | −4.70 | 2.92 × 10⁻⁰⁵ |
| | SEQ ID NO: 15 | | (calcitonin) activity | | |
| 218769_s_at | NM_023039.1 | 57763 | Ankyrin repeat, | −4.70 | 2.58 × 10⁻⁰⁵ |
| | SEQ ID NO: 16 | | family A (RFXAN | | |
| 219981_x_at | NM_017961.1 | 55044 | Hypothetical protein | −4.66 | 4.44 × 10⁻⁰⁵ |
| | SEQ ID NO: 17 | | FLJ20813 | | |
| 222131_x_at | BC004327.1 | 89941 | Hypothetical protein | −4.64 | 3.26 × 10⁻⁰⁵ |
| | SEQ ID NO: 18 | | BC014942 | | |
| 213234_at | AB040900.1 | 57613 | KIAA1467 protein | −4.60 | 3.73 × 10⁻⁰⁵ |
| | SEQ ID NO: 19 | | | | |
| 219197_s_at | AI424243 | 57758 | CEGP1 protein | −4.57 | 3.45 × 10⁻⁰⁵ |
| | SEQ ID NO: 20 | | | | |
| 205425_at | NM_005338.3 | 3092 | Huntington | −4.51 | 8.86 × 10⁻⁰⁵ |
| | SEQ ID NO: 21 | | interacting protein | | |
| 213504_at | W63732 | 10980 | COP9 subunit 6 | −4.50 | 4.98 × 10⁻⁰⁵ |
| | SEQ ID NO: 22 | | (MOV34 homolog, | | |
| 201413_at | NM_000414.1 | 3295 | Hydroxysteroid (17- | −4.46 | 5.71 × 10⁻⁰⁵ |
| | SEQ ID NO: 23 | | beta) dehydr | | |
| 203050_at | NM_005657.1 | 7158 | Tumor protein p53 | −4.45 | 7.53 × 10⁻⁰⁵ |
| | SEQ ID NO: 24 | | binding prote | | |
| 212494_at | AB028998.1 | 23371 | KIAA1075 protein | −4.43 | 9.46 × 10⁻⁰⁵ |
| | SEQ ID NO: 25 | | | | |
| 209173_at | AF088867.1 | 10551 | Anterior gradient 2 | −4.41 | 6.36 × 10⁻⁰⁵ |
| | SEQ ID NO: 26 | | homolog (Xe | | |
| 201124_at | AL048423 | 3693 | Integrin, beta 5 | −4.41 | 7.76 × 10⁻⁰⁵ |
| | SEQ ID NO: 27 | | | | |
| 205354_at | NM_000156.3 | 2593 | Guanidinoacetate | −4.39 | 8.11 × 10⁻⁰⁵ |
| | SEQ ID NO: 28 | | N-methyltransf | | |
| 212444_at | AA156240 | | Homo sapiens | −4.37 | 7.71 × 10⁻⁰⁵ |
| | SEQ ID NO: 29 | | cDNA: FLJ22182 | | |
| | | | fis | | |
| 205225_at | NM_000125.1 | 2099 | Estrogen receptor 1 | −4.37 | 8.12 × 10⁻⁰⁵ |
| | SEQ ID NO: 30 | | | | |
| 211000_s_at | AB015706.1 | 3572 | Interleukin 6 signal | −4.36 | 9.16 × 10⁻⁰⁵ |
| | SEQ ID NO: 31 | | transducer | | |
| 204012_s_at | AL529189 | 9836 | KIAA0547 gene | −4.36 | 8.63 × 10⁻⁰⁵ |
| | SEQ ID NO: 32 | | product | | |
| 203682_s_at | NM_002225.2 | 3712 | Isovaleryl | −4.35 | 7.60 × 10⁻⁰⁵ |
| | SEQ ID NO: 33 | | Coenzyme A | | |
| | | | dehydroge | | |
| 220357_s_at | NM_016276.1 | 10110 | Serum/glucocorticoid | −4.35 | 5.94 × 10⁻⁰⁵ |
| | SEQ ID NO: 34 | | regulated | | |
| 216173_at | AK025360.1 | | Homo sapiens | −4.32 | 7.65 × 10⁻⁰⁵ |
| | SEQ ID NO: 35 | | cDNA: FLJ21707 | | |
| | | | fis | | |
| 210230_at | BC003629.1 | 6066 | RNA, U2 small | −4.26 | 9.95 × 10⁻⁰⁵ |
| | SEQ ID NO: 36 | | nuclear | | |
| 219044_at | NM_018271.1 | 55258 | Hypothetical protein | −4.25 | 1.75 × 10⁻⁰⁴ |
| | SEQ ID NO: 37 | | FLJ10916 | | |
| 218761_at | NM_017610.1 | 54778 | Likely ortholog of | −4.23 | 1.35 × 10⁻⁰⁴ |
| | SEQ ID NO: 38 | | mouse Arkadi | | |
| 210826_x_at | AF098533.1 | 5884 | RAD17 homolog | −4.22 | 1.44 × 10⁻⁰⁴ |
| | SEQ ID NO: 39 | | (S. pombe) | | |
| 210831_s_at | L27489.1 | 5733 | Prostaglandin E | −4.22 | 1.07 × 10⁻⁰⁴ |
| | SEQ ID NO: 40 | | receptor 3 (sub | | |
| 211233_x_at | M12674.1 | 2099 | Estrogen receptor 1 | −4.21 | 1.20 × 10⁻⁰⁴ |
| | SEQ ID NO: 41 | | | | |
| 218807_at | NM_006113.2 | 10451 | Vav 3 oncogene | −4.20 | 1.46 × 10⁻⁰⁴ |
| | SEQ ID NO: 42 | | | | |
| 210129_s_at | AF078842.1 | 26140 | DKFZP434B103 | −4.19 | 1.09 × 10⁻⁰⁴ |
| | SEQ ID NO: 43 | | protein | | |
| 39313_at | AB002342 | 65125 | Protein kinase, | −4.19 | 1.23 × 10⁻⁰⁴ |
| | SEQ ID NO: 44 | | lysine deficien | | |
| 213245_at | AL120173 | | Homo sapiens | −4.18 | 1.43 × 10⁻⁰⁴ |
| | SEQ ID NO: 45 | | cDNA FLJ30781 | | |
| | | | fis, | | |
| 214053_at | AW772192 | | Homo sapiens clone | −4.18 | 1.51 × 10⁻⁰⁴ |
| | SEQ ID NO: 46 | | 23736 mRNA s | | |
| 205352_at | NM_005025.1 | 5274 | Serine (or cysteine) | −4.17 | 1.47 × 10⁻⁰⁴ |
| | SEQ ID NO: 47 | | proteinase | | |
| 213623_at | NM_007054.1 | 11127 | Kinesin family | −4.15 | 1.88 × 10⁻⁰⁴ |
| | SEQ ID NO: 48 | | member 3A | | |
| 215304_at | U79293.1 | | Human clone 23948 | −4.13 | 1.40 × 10⁻⁰⁴ |
| | SEQ ID NO: 49 | | mRNA sequence | | |
| 203009_at | NM_005581.1 | 4059 | Lutheran blood | −4.13 | 1.80 × 10⁻⁰⁴ |
| | SEQ ID NO: 50 | | group (Auberger | | |
| 218692_at | NM_017786.1 | 55638 | Hypothetical protein | −4.13 | 1.76 × 10⁻⁰⁴ |
| | SEQ ID NO: 51 | | FLJ20366 | | |
| 218976_at | NM_021800.1 | 56521 | J domain containing | −4.12 | 1.76 × 10⁻⁰⁴ |
| | SEQ ID NO: 52 | | protein 1 | | |
| 201405_s_at | NM_006833.1 | 10980 | COP9 subunit 6 | −4.11 | 1.63 × 10⁻⁰⁴ |
| | SEQ ID NO: 53 | | (MOV34 homolog, | | |
| 202168_at | NM_003187.1 | 6880 | TAF9 RNA | −4.11 | 2.01 × 10⁻⁰⁴ |
| | SEQ ID NO: 54 | | polymerase II, | | |
| | | | TATA bo | | |
| 216109_at | AK025348.1 | | Homo sapiens | −4.11 | 1.77 × 10⁻⁰⁴ |
| | SEQ ID NO: 55 | | cDNA: FLJ21695 | | |
| | | | fis | | |
| 219051_x_at | NM_024042.1 | 79006 | Hypothetical protein | −4.10 | 2.34 × 10⁻⁰⁴ |
| | SEQ ID NO: 56 | | MGC2601 | | |
| 210908_s_at | AB055804.1 | 5204 | Prefoldin 5 | −4.09 | 1.71 × 10⁻⁰⁴ |
| | SEQ ID NO: 57 | | | | |
| 221728_x_at | AK025198.1 | | Homo sapiens | −4.07 | 2.11 × 10⁻⁰⁴ |
| | SEQ ID NO: 58 | | cDNA FLJ30298 | | |
| | | | fis, | | |
| 203187_at | NM_001380.1 | 1793 | Dedicator of cytokinesis 1 | −4.06 | 2.22 × 10⁻⁰⁴ |
| | SEQ ID NO59 | | | | |
| 212660_at | AI735639 | 23338 | KIAA0239 protein | −4.04 | 2.56 × 10⁻⁰⁴ |
| | SEQ ID NO: 60 | | | | |
| 212956_at | AB020689.1 | 23158 | KIAA0882 protein | −4.01 | 2.27 × 10⁻⁰⁴ |
| | SEQ ID NO: 61 | | | | |
| 217838_s_at | NM_016337.1 | 51466 | RNB6 | −4.01 | 2.14 × 10⁻⁰⁴ |
| | SEQ ID NO: 62 | | | | |
| 218621_at | NM_016173.1 | 51409 | HEMK homolog | −4.01 | 1.92 × 10⁻⁰⁴ |
| | SEQ ID NO: 63 | | 7 kb | | |
| 201681_s_at | AB011155.1 | 9231 | Discs, large | −4.01 | 2.49 × 10⁻⁰⁴ |
| | SEQ ID NO: 64 | | (Drosophila) homol | | |
| 209884_s_at | AF047033.1 | 9497 | Solute carrier | −4.00 | 2.98 × 10⁻⁰⁴ |
| | SEQ ID NO: 65 | | family 4, sodium | | |
| 201557_at | NM_014232.1 | 6844 | Vesicle-associated | −3.99 | 2.23 × 10⁻⁰⁴ |
| | SEQ ID NO: 66 | | membrane pro | | |
| 219338_s_at | NM_017691.1 | 54839 | Hypothetical protein | −3.99 | 2.94 × 10⁻⁰⁴ |
| | SEQ ID NO: 67 | | FLJ20156 | | |
| 217828_at | NM_024755.1 | 79811 | Hypothetical protein | −3.98 | 2.42 × 10⁻⁰⁴ |
| | SEQ ID NO: 68 | | FLJ13213 | | |
| 209339_at | U76248.1 | 6478 | Seven in absentia | −3.98 | 2.26 × 10⁻⁰⁴ |
| | SEQ ID NO: 69 | | homolog 2 (Dr | | |
| 214218_s_at | AV699347 | | Homo sapiens | −3.97 | 2.82 × 10⁻⁰⁴ |
| | SEQ ID NO: 70 | | cDNA FLJ30298 | | |
| | | | fis, | | |
| 221643_s_at | AF016005.1 | 473 | Arginine-glutamic | −3.96 | 2.57 × 10⁻⁰⁴ |
| | SEQ ID NO: 71 | | acid dipeptid | | |
| 218211_s_at | NM_024101.1 | 79083 | Melanophilin | −3.95 | 3.05 × 10⁻⁰⁴ |
| | SEQ ID NO: 72 | | | | |
| 221483_s_at | AF084555.1 | 10776 | Cyclic AMP | −3.95 | 2.83 × 10⁻⁰⁴ |
| | SEQ ID NO: 73 | | phosphoprotein, 19 k | | |
| 211864_s_at | AF207990.1 | 26509 | Fer-1-like 3, | −3.92 | 3.29 × 10⁻⁰⁴ |
| | SEQ ID NO: 74 | | myoferlin (C. ele | | |
| 202392_s_at | NM_014338.1 | 23761 | Phosphatidylserine | −3.92 | 4.33 × 10⁻⁰⁴ |
| | SEQ ID NO: 75 | | decarboxylas | | |
| 214164_x_at | BF752277 | 164 | Adaptor-related | −3.91 | 3.52 × 10⁻⁰⁴ |
| | SEQ ID NO: 76 | | protein complex | | |
| 204862_s_at | NM_002513.1 | 4832 | Non-metastatic cells | −3.91 | 3.55 × 10⁻⁰⁴ |
| | SEQ ID NO: 77 | | 3, protein | | |
| 215552_s_at | AI073549 | 2099 | Estrogen receptor 1 | −3.91 | 3.33 × 10⁻⁰⁴ |
| | SEQ ID NO: 78 | | | | |
| 211235_s_at | AF258450.1 | 2099 | Estrogen receptor 1 | −3.90 | 3.13 × 10⁻⁰⁴ |
| | SEQ ID NO: 79 | | | | |
| 210833_at | AL031429 | 5733 | Prostaglandin E | −3.89 | 3.06 × 10⁻⁰⁴ |
| | SEQ ID NO: 80 | | receptor 3 (sub | | |
| 204660_at | NM_005262.1 | 2671 | Growth factor, | −3.89 | 2.79 × 10⁻⁰⁴ |
| | SEQ ID NO: 81 | | augmenter of liv | | |
| 211234_x_at | AF258449.1 | 2099 | Estrogen receptor 1 | −3.89 | 3.10 × 10⁻⁰⁴ |
| | SEQ ID NO: 82 | | | | |
| 201508_at | NM_001552.1 | 3487 | Insulin-like growth | −3.88 | 4.04 × 10⁻⁰⁴ |
| | SEQ ID NO: 83 | | factor bind | | |
| 213527_s_at | AI350500 | 146542 | Similar to | −3.85 | 4.33 × 10⁻⁰⁴ |
| | SEQ ID NO: 84 | | hypothetical protein | | |
| 202048_s_at | NM_014292.1 | 23466 | Chromobox | −3.84 | 4.15 × 10⁻⁰⁴ |
| | SEQ ID NO: 85 | | homolog 6 | | |
| 206794_at | NM_005235.1 | 2066 | v-erb-a | −3.84 | 3.87 × 10⁻⁰⁴ |
| | SEQ ID NO: 86 | | erythroblastic | | |
| | | | leukemia | | |
| 201798_s_at | NM_013451.1 | 26509 | Fer-1-like 3, | −3.83 | 4.44 × 10⁻⁰⁴ |
| | SEQ ID NO: 87 | | myoferlin (C. ele | | |
| 213523_at | AI671049 | 898 | Cyclin E1 | 3.81 | 4.14 × 10⁻⁰⁴ |
| | SEQ ID NO: 88 | | | | |
| 209050_s_at | AI421559 | 5900 | Ral guanine | 3.83 | 4.07 × 10⁻⁰⁴ |
| | SEQ ID NO: 89 | | nucleotide dissocia | | |
| 217294_s_at | U88968.1 | 2023 | Enolase 1, (alpha) | 3.84 | 4.48 × 10⁻⁰⁴ |
| | SEQ ID NO: 90 | | | | |
| 201555_at | NM_002388.2 | 4172 | MCM3 | 3.84 | 4.41 × 10⁻⁰⁴ |
| | SEQ ID NO: 91 | | minichromosome | | |
| | | | maintenance | | |
| 201030_x_at | NM_002300.1 | 3945 | Lactate | 3.85 | 3.85 × 10⁻⁰⁴ |
| | SEQ ID NO: 92 | | dehydrogenase B | | |
| 202912_at | NM_001124.1 | 133 | Adrenomedullin | 3.86 | 3.59 × 10⁻⁰⁴ |
| | SEQ ID NO: 93 | | | | |
| 204050_s_at | NM_001833.1 | 1211 | Clathrin, light | 3.88 | 3.97 × 10⁻⁰⁴ |
| | SEQ ID NO: 94 | | polypeptide (Lc | | |
| 202342_s_at | NM_015271.1 | 23321 | Tripartite motif- | 3.88 | 4.43 × 10⁻⁰⁴ |
| | SEQ ID NO: 95 | | containing 2 | | |
| 209393_s_at | AF047695.1 | 9470 | Eukaryotic | 3.89 | 4.21 × 10⁻⁰⁴ |
| | SEQ ID NO: 96 | | translation initiati | | |
| 219774_at | NM_019044.1 | 54520 | Hypothetical protein | 3.93 | 3.86 × 10⁻⁰⁴ |
| | SEQ ID NO: 97 | | FLJ10996 | | |
| 204162_at | NM_006101.1 | 10403 | Highly expressed in | 3.93 | 2.94 × 10⁻⁰⁴ |
| | SEQ ID NO: 98 | | cancer, ric | | |
| 216237_s_at | AA807529 | 4174 | MCM5 | 3.96 | 2.84 × 10⁻⁰⁴ |
| | SEQ ID NO: 99 | | minichromosome | | |
| | | | maintenance | | |
| 214581_x_at | BE568134 | 27242 | Tumor necrosis | 3.99 | 3.07 × 10⁻⁰⁴ |
| | SEQ ID NO: 100 | | factor receptor | | |
| 209408_at | U63743.1 | 11004 | Kinesin-like 6 | 3.99 | 2.23 × 10⁻⁰⁴ |
| | SEQ ID NO: 101 | | (mitotic centrom | | |
| 208370_s_at | NM_004414.2 | 1827 | Down syndrome | 4.02 | 2.94 × 10⁻⁰⁴ |
| | SEQ ID NO: 102 | | critical region g | | |
| 203744_at | NM_005342.1 | 3149 | High-mobility | 4.02 | 2.02 × 10⁻⁰⁴ |
| | SEQ ID NO: 103 | | group box 3 | | |
| 209575_at | BC001903.1 | 3588 | Interleukin 10 | 4.03 | 2.84 × 10⁻⁰⁴ |
| | SEQ ID NO: 104 | | receptor, beta | | |
| 200934_at | NM_003472.1 | 7913 | DEK oncogene | 4.05 | 2.54 × 10⁻⁰⁴ |
| | SEQ ID NO: 105 | | (DNA binding) | | |
| 202341_s_at | AA149745 | 23321 | Tripartite motif- | 4.06 | 2.87 × 10⁻⁰⁴ |
| | SEQ ID NO: 106 | | containing 2 | | |
| 200996_at | NM_005721.2 | 10096 | ARP3 actin-related | 4.06 | 2.42 × 10⁻⁰⁴ |
| | SEQ ID NO: 107 | | protein 3 ho | | |
| 206392_s_at | NM_002888.1 | 5918 | Retinoic acid | 4.06 | 2.28 × 10⁻⁰⁴ |
| | SEQ ID NO: 108 | | receptor responde | | |
| 206391_at | NM_002888.1 | 5918 | Retinoic acid | 4.07 | 2.52 × 10⁻⁰⁴ |
| | SEQ ID NO: 109 | | receptor responde | | |
| 201797_s_at | NM_006295.1 | 7407 | Valyl-tRNA | 4.07 | 2.17 × 10⁻⁰⁴ |
| | SEQ ID NO: 110 | | synthetase 2 | | |
| 209358_at | AF118094.1 | 6882 | TAF11 RNA | 4.07 | 2.34 × 10⁻⁰⁴ |
| | SEQ ID NO: 111 | | polymerase II, | | |
| | | | TATA b | | |
| 209201_x_at | L01639.1 | 7852 | Chemokine (C—X—C | 4.09 | 2.80 × 10⁻⁰⁴ |
| | SEQ ID NO: 112 | | motif) recepto | | |
| 209016_s_at | BC002700.1 | 3855 | Keratin 7 | 4.14 | 1.69 × 10⁻⁰⁴ |
| | SEQ ID NO: 113 | | | | |
| 221957_at | BF939522 | 5165 | Pyruvate | 4.15 | 2.22 × 10⁻⁰⁴ |
| | SEQ ID NO: 114 | | dehydrogenase | | |
| | | | kinase, | | |
| 218350_s_at | NM_015895.1 | 51053 | Geminin, DNA | 4.16 | 1.64 × 10⁻⁰⁴ |
| | SEQ ID NO: 115 | | replication inhibi | | |
| 201897_s_at | NM_001826.1 | 84722 | p53-regulated | 4.21 | 1.36 × 10⁻⁰⁴ |
| | SEQ ID NO: 116 | | DDA3 | | |
| 209642_at | AF043294.2 | 699 | BUB1 budding | 4.22 | 1.22 × 10⁻⁰⁴ |
| | SEQ ID NO: 117 | | uninhibited by ben | | |
| 201930_at | NM_005915.2 | 4175 | MCM6 | 4.23 | 1.16 × 10⁻⁰⁴ |
| | SEQ ID NO: 118 | | minichromosome | | |
| | | | maintenance | | |
| 202870_s_at | NM_001255.1 | 991 | CDC20 cell division | 4.23 | 1.07 × 10⁻⁰⁴ |
| | SEQ ID NO: 119 | | cycle 20 ho | | |
| 221485_at | NM_004776.1 | 9334 | UDP- | 4.26 | 1.08 × 10⁻⁰⁴ |
| | SEQ ID NO: 120 | | Gal: betaGlcNAc | | |
| | | | beta 1,4-ga | | |
| 211919_s_at | AF348491.1 | 7852 | Chemokine (C—X—C | 4.27 | 1.61 × 10⁻⁰⁴ |
| | SEQ ID NO: 121 | | motif) recepto | | |
| 218887_at | NM_015950.1 | 51069 | Mitochondrial | 4.27 | 8.93 × 10⁻⁰⁵ |
| | SEQ ID NO: 122 | | ribosomal protein | | |
| 216295_s_at | X81636.1 | | H. sapiens clathrin | 4.28 | 1.17 × 10⁻⁰⁴ |
| | SEQ ID NO: 123 | | light chain | | |
| 218726_at | NM_018410.1 | 55355 | Hypothetical protein | 4.28 | 1.19 × 10⁻⁰⁴ |
| | SEQ ID NO: 124 | | DKFZp762E1 | | |
| 204989_s_at | BF305661 | 3691 | Integrin, beta 4 | 4.30 | 1.01 × 10⁻⁰⁴ |
| | SEQ ID NO: 125 | | | | |
| 221872_at | AI669229 | 5918 | Retinoic acid | 4.31 | 1.12 × 10⁻⁰⁴ |
| | SEQ ID NO: 126 | | receptor responde | | |
| 206746_at | NM_001195.2 | 631 | Beaded filament | 4.32 | 9.33 × 10⁻⁰⁵ |
| | SEQ ID NO: 127 | | structural prot | | |
| 201231_s_at | NM_001428.1 | 2023 | Enolase 1, (alpha) | 4.42 | 5.76 × 10⁻⁰⁵ |
| | SEQ ID NO: 128 | | | | |
| 204203_at | NM_001806.1 | 1054 | CCAAT/enhancer | 4.42 | 6.44 × 10⁻⁰⁵ |
| | SEQ ID NO: 129 | | binding protein | | |
| 211555_s_at | AF020340.1 | 2983 | Guanylate cyclase | 4.47 | 5.11 × 10⁻⁰⁵ |
| | SEQ ID NO: 130 | | 1, soluble, b | | |
| 202200_s_at | NM_003137.1 | 6732 | SFRS protein kinase 1 | 4.47 | 5.17 × 10⁻⁰⁵ |
| | SEQ ID NO: 131 | | | | |
| 213101_s_at | Z78330 | | Homo sapiens | 4.49 | 7.76 × 10⁻⁰⁵ |
| | SEQ ID NO: 132 | | mRNA; cDNA | | |
| | | | DKFZp68 | | |
| 204600_at | NM_004443.1 | 2049 | EphB3 | 4.51 | 5.81 × 10⁻⁰⁵ |
| | SEQ ID NO: 133 | | | | |
| 212689_s_at | AA524505 | 55818 | Zinc finger protein | 4.52 | 5.10 × 10⁻⁰⁵ |
| | SEQ ID NO: 134 | | | | |
| 209773_s_at | BC001886.1 | 6241 | Ribonucleotide | 4.55 | 3.18 × 10⁻⁰⁵ |
| | SEQ ID NO: 135 | | reductase M2 pol | | |
| 204962_s_at | NM_001809.2 | 1058 | Centromere protein | 4.62 | 3.00 × 10⁻⁰⁵ |
| | SEQ ID NO: 136 | | A, 17 kDa | | |
| 211519_s_at | AY026505.1 | 11004 | Kinesin-like 6 | 4.62 | 2.41 × 10⁻⁰⁵ |
| | SEQ ID NO: 137 | | (mitotic centrom | | |
| 204825_at | NM_014791.1 | 9833 | Maternal embryonic | 4.73 | 2.45 × 10⁻⁰⁵ |
| | SEQ ID NO: 138 | | leucine zipp | | |
| 203287_at | NM_005558.1 | 3898 | Ladinin 1 | 4.74 | 2.06 × 10⁻⁰⁵ |
| | SEQ ID NO: 139 | | | | |
| 204913_s_at | AI360875 | 6664 | SRY (sex | 4.77 | 2.44 × 10⁻⁰⁵ |
| | SEQ ID NO: 140 | | determining region | | |
| | | | Y)- | | |
| 217028_at | AJ224869 | | | 4.82 | 2.56 × 10⁻⁰⁵ |
| | SEQ ID NO: 141 | | | | |
| 204750_s_at | BF196457 | 1824 | Desmocollin 2 | 4.84 | 1.78 × 10⁻⁰⁵ |
| | SEQ ID NO: 142 | | | | |
| 216222_s_at | AI561354 | 4651 | Myosin X | 4.84 | 1.93 × 10⁻⁰⁵ |
| | SEQ ID NO: 143 | | | | |
| 1438_at | X75208 | 2049 | EphB3 | 5.02 | 9.02 × 10⁻⁰⁶ |
| | SEQ ID NO: 144 | | | | |
| 203693_s_at | NM_001949.2 | 1871 | E2F transcription | 5.17 | 4.83 × 10⁻⁰⁶ |
| | SEQ ID NO: 145 | | factor 3 | | |
| 205548_s_at | NM_006806.1 | 10950 | BTG family, | 5.64 | 1.96 × 10⁻⁰⁶ |
| | SEQ ID NO: 146 | | member 3 | | |
| 201976_s_at | NM_012334.1 | 4651 | Myosin X | 5.68 | 8.74 × 10⁻⁰⁷ |
| | SEQ ID NO: 147 | | | | |
| 213134_x_at | AI765445 | 10950 | BTG family, | 5.76 | 1.31 × 10⁻⁰⁶ |
| | SEQ ID NO: 148 | | member 3 | | |
| 40016_g_at | AB002301 | 23227 | KIAA0303 protein | 4.26 | 1.071 × 10⁻⁰⁴ |
| | SEQ ID NO: 149 | | | | |
| 206352_s_at | AB013818 | 5192 | peroxisome | 4.28 | 5.79 × 10⁻⁰⁵ |
| | SEQ ID NO: 150 | | biogenesis factor 10 | | |
| 205074_at | AB015050 | 6584 | solute carrier family | 4.64 | 2.24 × 10⁻⁰⁵ |
| | SEQ ID NO: 151 | | 22 member 5 | | |
| 213527_s_at | AC002310 | 146542 | similar to | 4.62 | 3.16 × 10⁻⁰⁵ |
| | SEQ ID NO: 152 | | hypothetical protein | | |
| | | | MGC13138 | | |
| 216835_s_at | AF035299 | 1796 | docking protein 1, | 4.44 | 3.32 × 10⁻⁰⁵ |
| | SEQ ID NO: 153 | | 62 kDa | | |
| 209617_s_at | AF035302 | 1501 | catenin (cadherin- | 5.16 | 1.7 × 10⁻⁰⁶ |
| | SEQ ID NO: 154 | | associated protein), | | |
| | | | delta 2 (neural | | |
| | | | plakophilin-related | | |
| | | | arm-repeat protein) | | |
| 208945_s_at | AF139131 | 8678 | beclin 1 (coiled- | 5.61 | 5.0 × 10⁻⁰⁷ |
| | SEQ ID NO: 155 | | coil, myosin-like | | |
| | | | BCL2 interacting | | |
| | | | protein) | | |
| 222275_at | AI039469 | 10884 | mitochondrial | 4.51 | 2.16 × 10⁻⁰⁵ |
| | SEQ ID NO: 156 | | ribosomal protein | | |
| | | | S30 | | |
| 203929_s_at | AI056359 | 4137 | microtubule- | 6.60 | 0.0 × 10⁻⁰⁴ |
| | SEQ ID NO: 157 | | associated protein | | |
| | | | tau | | |
| 215552_s_at | AI073549 | 2099 | Estrogen receptor 1 | 4.51 | 2.51 × 10⁻⁰⁵ |
| | SEQ ID NO: 158 | | | | |
| 212956_at | AI348094 | 23158 | KIAA0882 protein | 4.40 | 7.0 × 10⁻⁰⁵ |
| | SEQ ID NO: 159 | | | | |
| 204913_s_at | AI360875 | 6664 | SRY (sex | −4.45 | 9.92 × 10⁻⁰⁵ |
| | SEQ ID NO: 160 | | determining region | | |
| | | | Y)-box 11 | | |
| 213855_s_at | AI500366 | 3991 | lipase, hormone- | 4.17 | 1.08 × 10⁻⁰⁴ |
| | SEQ ID NO: 161 | | sensitive | | |
| 212239_at | AI680192 | 5295 | phosphoinositide-3- | 4.36 | 4.71 × 10⁻⁰⁵ |
| | SEQ ID NO: 162 | | kinase, regulatory | | |
| | | | subunit, polypeptide | | |
| | | | 1 (p85 alpha) | | |
| 203928_x_at | AI870749 | 4137 | microtubule- | 5.91 | 8 × 10⁻⁰⁸ |
| | SEQ ID NO: 163 | | associated protein | | |
| | | | tau | | |
| 214124_x_at | AL043487 | 11116 | FGFR1 oncogene | 5.18 | 3.1 × 10⁻⁰⁶ |
| | SEQ ID NO: 164 | | partner | | |
| 212195_at | AL049265 | — | MRNA; cDNA | 4.25 | 1.11 × 10⁻⁰⁴ |
| | SEQ ID NO: 165 | | DKFZp564F053 | | |
| 210222_s_at | BC000314 | 6252 | reticulon 1 | 4.08 | 1.07 × 10⁻⁰⁴ |
| | SEQ ID NO: 166 | | | | |
| 210958_s_at | BC003646 | 23227 | KIAA0303 protein | 4.43 | 4.26 × 10⁻⁰⁵ |
| | SEQ ID NO: 167 | | | | |
| 204863_s_at | BE856546 | 3572 | interleukin 6 signal | 4.28 | 8.20 × 10⁻⁰⁵ |
| | SEQ ID NO: 168 | | transducer (gp130, | | |
| | | | oncostatin M | | |
| | | | receptor) | | |
| 213911_s_at | BF718636 | 3015 | H2A histone family, | −4.16 | 1.10 × 10⁻⁰⁴ |
| | SEQ ID NO: 169 | | member Z | | |
| 212207_at | BG426689 | 23389 | thyroid hormone | 6.06 | 1.0 × 10⁻⁰⁷ |
| | SEQ ID NO: 170 | | receptor associated | | |
| | | | protein 2 | | |
| 209696_at | D26054 | 2203 | fructose-1,6- | 4.29 | 9.21 × 10⁻⁰⁵ |
| | SEQ ID NO: 171 | | bisphosphatase 1 | | |
| 209443_at | J02639 | 5104 | serine (or cysteine) | 4.21 | 6.95 × 10⁻⁰⁵ |
| | SEQ ID NO: 172 | | proteinase inhibitor, | | |
| | | | clade A (alpha-1 | | |
| | | | antiproteinase, | | |
| | | | antitrypsin), | | |
| | | | member 5 | | |
| 202862_at | NM_000137 | 2184 | fumarylacetoacetate | 4.34 | 5.59 × 10⁻⁰⁵ |
| | SEQ ID NO: 173 | | hydrolase | | |
| | | | (fumarylacetoacetase) | | |
| 214440_at | NM_000662 | 9 | N-acetyltransferase | 4.24 | 6.75 × 10⁻⁰⁵ |
| | SEQ ID NO: 174 | | 1 (arylamine N- | | |
| | | | acetyltransferase) | | |
| 208305_at | NM_000926 | 5241 | progesterone | 4.15 | 8.19 × 10⁻⁰⁵ |
| | SEQ ID NO: 175 | | receptor | | |
| 202204_s_at | NM_001144 | 267 | autocrine motility | 5.28 | 1.29 × 10⁻⁰⁶ |
| | SEQ ID NO: 176 | | factor receptor | | |
| 204862_s_at | NM_002513 | 4832 | non-metastatic cells | 4.30 | 8.95 × 10⁻⁰⁵ |
| | SEQ ID NO: 177 | | 3, protein expressed | | |
| | | | in | | |
| 202641_at | NM_004311 | 403 | ADP-ribosylation | 4.24 | 9.46 × 10⁻⁰⁵ |
| | SEQ ID NO: 178 | | factor-like 3 | | |
| 200896_x_at | NM_004494 | 3068 | hepatoma-derived | −4.87 | 1.38 × 10⁻⁰⁵ |
| | SEQ ID NO: 179 | | growth factor (high- | | |
| | | | mobility group | | |
| | | | protein 1-like) | | |
| 203071_at | NM_004636 | 7869 | sema domain, | 4.65 | 1.63 × 10⁻⁰⁵ |
| | SEQ ID NO: 180 | | immunoglobulin | | |
| | | | domain (Ig), short | | |
| | | | basic domain, | | |
| | | | secreted, | | |
| | | | (semaphorin) 3B | | |
| 205012_s_at | NM_005326 | 3029 | hydroxyacylglutathi | 4.60 | 3.62 × 10⁻⁰⁵ |
| | SEQ ID NO: 181 | | one hydrolase | | |
| 204916_at | NM_005855 | 10267 | receptor (calcitonin) | 5.47 | 5.10 × 10⁻⁰⁷ |
| | SEQ ID NO: 182 | | activity modifying | | |
| | | | protein 1 | | |
| 204792_s_at | NM_014714 | 9742 | KIAA0590 gene | 4.14 | 1.12 × 10⁻⁰⁴ |
| | SEQ ID NO: 183 | | product | | |
| 208202_s_at | NM_015288 | 23338 | PHD finger protein | 4.18 | 1.08 × 10⁻⁰⁴ |
| | SEQ ID NO: 184 | | 15 | | |
| 217770_at | NM_015937 | 51604 | phosphatidylinositol | 4.33 | 5.43 × 10⁻⁰⁵ |
| | SEQ ID NO: 185 | | glycan, class T | | |
| 218671_s_at | NM_016311 | 93974 | ATPase inhibitory | 4.18 | 9.04 × 10⁻⁰⁵ |
| | SEQ ID NO: 186 | | factor 1 | | |
| 219872_at | NM_016613 | 51313 | hypothetical protein | 4.10 | 1.03 × 10⁻⁰⁴ |
| | SEQ ID NO: 187 | | DKFZp434L142 | | |
| 219197_s_at | NM_020974 | 57758 | signal peptide, CUB | 5.43 | 6.8 × 10⁻⁰⁷ |
| | SEQ ID NO: 188 | | domain, EGF-like 2 | | |
| 203485_at | NM_021136 | 6252 | reticulon 1 | 4.18 | 7.56 × 10⁻⁰⁵ |
| | SEQ ID NO: 189 | | | | |
| 206936_x_at | NM_022335 | 4718 | NADH | 4.28 | 6.46 × 10⁻⁰⁵ |
| | SEQ ID NO: 190 | | dehydrogenase | | |
| | | | (ubiquinone) 1, | | |
| | | | subcomplex | | |
| | | | unknown, 2, | | |
| | | | 14.5 kDa | | |
| 220540_at | NM_022358 | 60598 | potassium channel, | 4.68 | 1.32 × 10⁻⁰⁵ |
| | SEQ ID NO: 191 | | subfamily K, | | |
| | | | member 15 | | |
| 219438_at | NM_024522 | 79570 | hypothetical protein | 4.82 | 6.68 × 10⁻⁰⁶ |
| | SEQ ID NO: 192 | | FLJ12650 | | |
| 205696_s_at | U97144 | 2674 | GDNF family | 4.89 | 7.15 × 10⁻⁰⁶ |
| | SEQ ID NO: 193 | | receptor alpha 1 | | |

[0047] A. Tau Gene Encodes a Microtubule-Associated Protein

[0048] Previous reports indicate that Tau promotes assembly and stabilization of microtubules similar to paclitaxel but with lower affinity and in a reversible manner (Drubin and Kirschner, 1986; Al-Bassam et al., 2002). The inventors examined if Tau could reduce paclitaxel-induced microtubule polymerization and found that pre-incubation of tubulin with Tau substantially reduced polymerization caused by paclitaxel. This could occur through substrate depletion or direct inhibition of paclitaxel binding to tubulin. The presence of Tau reduces the binding of fluorescent paclitaxel to tubulin in vitro and also reduces the accumulation of fluorescent paclitaxel in breast cancer cells in culture. These results demonstrate that Tau partially protects cells from paclitaxel-induced microtubule polymerization and subsequent cell death by competing with paclitaxel for binding to tubulin. Tau is able to bind to both at the outer surface and to the inner, luminal surface of microtubules. The luminal surface contains the paclitaxel binding sites. Kar et al. (2003) have reported that Tau stabilizes microtubules in a similar way to paclitaxel, and it may be the natural substrate that binds to the ‘paclitaxel’ pocket in β-tubulin.

[0049] Other investigators have reported that under different experimental circumstances Tau may enhance cooperative binding of paclitaxel to microtubules (Diaz et al., 2003). In all of these reports, paclitaxel exposure preceded Tau exposure and this could account for the different results. When the function of Tau is studied on paclitaxel-stabilized microtubules, Tau binds to the outer surface of tubulin rather than to the inner surface and enhances polymerization by paclitaxel (Al-Bassam et al., 2002; Chau et al., 1998).

[0050] As described herein, Tau or a gene encoding Tau is a marker of sensitivity to paclitaxel-containing chemotherapy, it is also clear that many tumors despite low Tau expression are not fully sensitive to treatment. Tau has a strong negative correlation with pathological CR. Around 50% of patients with low Tau expression had residual cancer suggesting frequent additional pathways of resistance. A few tumors with high Tau expression (14%) also experienced complete pathologic response. These observations are consistent with the commonly held belief that response and resistance to chemotherapy are multifactorial processes involving drug transport, drug metabolism, and alterations in drug targets and in pro- and anti-apoptotic pathways (Horwitz et al., 1993; Orr et al., 2003).

[0051] Tau could be used as a marker to identify the subset of patients who benefit from paclitaxel-containing therapy and could also serve as a target to modulate response to paclitaxel. The association between Tau and pathological CR has been validated using immunohistochemistry in an independent patient population. Down regulation of Tau expression is also shown herein to increase the sensitivity of breast cancer cells to paclitaxel, and also used to describe a mechanism for the sensitization to chemotherapy.

[0052] Low expression of microtubule-associated protein Tau within the tumor at the time of diagnosis was significantly associated with complete pathologic response. The inventors have validated this association at the protein level on an independent set of patients (n=122) using immunohistochemistry. Low Tau expression was shown to be not only a marker of response but it causes sensitivity to paclitaxel in vitro. Down regulation or reduction in the expression of Tau with, for example, siRNA in cancer cells increases sensitivity to paclitaxel, but not to epirubicin. Tau partially protects cells from paclitaxel induced apoptosis by reducing paclitaxel binding to tubulin and reducing paclitaxel induced microtubule polymerization. These observations suggest that Tau is a clinically useful predictor of benefit from paclitaxel-containing adjuvant chemotherapy for breast cancer and that inhibition of Tau function sensitizes cells to paclitaxel.

[0053] As described herein, low levels of Tau mRNA expression as measured by, but not limited to, cDNA microarrays or Tau protein expression detected by immunohistochemistry, are associated with higher rates of pathologic CR to P/FAC pre-operative chemotherapy for stage I-III breast cancer. This association was observed in two independent patient cohorts treated with essentially identical chemotherapy regimens. Pathologic CR in this context means complete eradication of the invasive cancer from the breast and lymph nodes by chemotherapy and has consistently been associated with excellent long-term survival that is independent of other tumor characteristics. The results indicate that assessment of Tau expression helps to identify patients at the time of diagnosis who have highly P/FAC sensitive tumors and therefore should receive this regimen if adjuvant or neoadjuvant chemotherapy is indicated.

[0054] Low Tau expression is associated with known clinicopathological predictors of response to chemotherapy such as ER-negative status and high nuclear grade. However, in contrast to these predictors that are not treatment regimen-specific, low Tau may predict extreme sensitivity to a particular drug, paclitaxel. Since Tau is a microtubule associated protein, Tau has a mechanistic role in determining cellular response to paclitaxel, which is a microtubule poison. The demonstration that down regulation of Tau by siRNA in breast cancer cells increases their sensitivity to paclitaxel but not to epirubicin suggests a direct role for Tau in determining response to this drug. Guise et al. (1999) have examined apoptosis induced by paclitaxel in the neuroblastoma SK-N-SH cell line with a special focus on Tau protein and have reported that treatment with retinoic acid increased Tau expression and decreased sensitivity to paclitaxel.

[0055] Tau represents a paclitaxel-specific predictor of sensitivity. This molecule may be used to identify patients with newly diagnosed breast cancer who require paclitaxel containing chemotherapy to maximize their chance of cure. Tau is also a potential therapeutic target because inhibition of its function increases sensitivity to paclitaxel.

[0056] B. Providing a Nucleic Acid Sample

[0057] One of skill in the art will appreciate that in order to assess the transcription level (and thereby the expression level) of a gene or genes, it is desirable to provide a nucleic acid sample derived from the mRNA transcript(s). As used herein, a nucleic acid derived from a mRNA transcript refers to a nucleic acid for whose synthesis the mRNA transcript or a subsequence thereof has ultimately served as a template. Thus, a cDNA reverse transcribed from an mRNA, an RNA transcribed from the cDNA, a DNA amplified from the cDNA, an RNA transcribed from the amplified DNA, and the like, are all derived from the mRNA transcript. Detection of such derived products is indicative of the presence and abundance of the original transcript in a sample. Thus, suitable samples include, but are not limited to, mRNA transcripts of the gene or genes, cDNA reverse transcribed from the mRNA, cRNA transcribed from the cDNA, and the like.

[0058] Where it is desired to quantify the transcription level of one or more genes in a sample, the concentration of the mRNA transcript(s) of the gene or genes is proportional to the transcription level of that gene. Similarly, it is preferred that the hybridization signal intensity be proportional to the amount of hybridized nucleic acid. As described herein, controls can be run to correct for variations introduced in sample preparation and hybridization.

[0059] In one embodiment, a nucleic acid sample is the total mRNA isolated from a biological sample. The term “biological sample,” as used herein, refers to a sample obtained from an organism or from components (e.g., cells) of an organism, including diseased tissue such as a tumor, a neoplasia or a hyperplasia. The sample may be of any biological tissue or fluid. Frequently the sample will be a “clinical sample,” which is a sample derived from a patient. Such samples include, but are not limited to, blood, blood cells (e.g., white cells), tissue biopsy or fine needle aspiration biopsy samples, urine, peritoneal fluid, and pleural fluid, or cells therefrom. Biological samples may also include sections of tissues such as frozen sections taken for histological purposes.

[0060] The nucleic acid may be isolated from the sample according to any of a number of methods well known to those of skill in the art. One of skill in the art will appreciate that where expression levels of a gene or genes are to be detected, preferably RNA (mRNA) is isolated. Methods of isolating total mRNA are well known to those of skill in the art. For example, methods of isolation and purification of nucleic acids are described in Chapter 3 of Laboratory Techniques in Biochemistry and Molecular Biology (1993); Sambrook et al. (2001); Current Protocols in Molecular Biology (1987), all of which are incorporated herein by reference. Filter based methods for the isolation of mRNA are also known in the art. Examples of commercially available filter-based RNA isolation systems include RNAqueous® (Ambion) and RNeasy (Qiagen).

[0061] Frequently, it is desirable to amplify the nucleic acid sample prior to hybridization. One of skill in the art will appreciate that whatever amplification method is used, if a quantitative result is desired, care must be taken to use a method that maintains or controls for the relative frequencies of the amplified nucleic acids.

[0062] Methods of “quantitative” amplification are well known to those of skill in the art. For example, quantitative PCR involves simultaneously co-amplifying a known quantity of a control sequence. This provides an internal standard that may be used to calibrate the PCR reaction. The array may then include probes specific to the internal standard for quantification of the amplified nucleic acid.

[0063] Other suitable amplification methods include, but are not limited to polymerase chain reaction (PCR) (Innis, et al., 1990), ligase chain reaction (LCR) (see Wu and Wallace, 1989); Landegren, et al., 1988; Barringer, et al., 1990, transcription amplification (Kwoh, et al., 1989), and self-sustained sequence replication (Guatelli, et al., 1990).

[0064] In a particular embodiment, the sample mRNA is reverse transcribed with a reverse transcriptase, such as SuperScript II (Invitrogen), and a primer consisting of an oligo-dT and a sequence encoding the phage T7 promoter to generate first-strand cDNA. A second-strand DNA is polymerized in the presence of a DNA polymerase, DNA ligase, and RNase H. The resulting double-stranded cDNA may be blunt-ended using T4 DNA polymerase and purified by phenol/chloroform extraction. The double-stranded cDNA is then transcribed into cRNA. Methods for the in vitro transcription of RNA are known in the art and describe in, for example, Van Gelder, et al. (1990) and U.S. Pat. Nos. 5,545,522; 5,716,785; and 5,891,636, all of which are incorporated herein by reference.

[0065] If desired, a label may be incorporated into the cRNA when it is transcribed. Those of skill in the art are familiar with methods for labeling nucleic acids. For example, the cRNA may be transcribed in the presence of biotin-ribonucleotides. The BioArray High Yield RNA Transcript Labeling Kit (Enzo Diagnostics) is a commercially available kit for biotinylating cRNA.

[0066] It will be appreciated by one of skill in the art that the direct transcription method described above provides an antisense (aRNA) pool. Where antisense RNA is used as the target nucleic acid, the oligonucleotide probes provided in the array are chosen to be complementary to subsequences of the antisense nucleic acids. Conversely, where the target nucleic acid pool is a pool of sense nucleic acids, the oligonucleotide probes are selected to be complementary to subsequences of the sense nucleic acids. Finally, where the nucleic acid pool is double stranded, the probes may be of either sense, as the target nucleic acids include both sense and antisense strands.

[0067] C. Labeling Nucleic Acids

[0068] To detect hybridization, it is advantageous to employ nucleic acids in combination with an appropriate detection means. Recognition moieties incorporated into primers, incorporated into the amplified product during amplification, or attached to probes are useful in the identification of nucleic acid molecules. A number of different labels may be used for this purpose including, but not limited to, fluorophores, chromophores, radiophores, enzymatic tags, antibodies, chemiluminescence, electroluminescence, and affinity labels. One of skill in the art will recognize that these and other labels can be used with success in this invention.

[0069] Examples of affinity labels include, but are not limited to the following: an antibody, an antibody fragment, a receptor protein, a hormone, biotin, Dinitrophenyl (DNP), or any polypeptide/protein molecule that binds to an affinity label.

[0070] Examples of enzyme tags include enzymes such as urease, alkaline phosphatase or peroxidase to mention a few. Colorimetric indicator substrates can be employed to provide a detection means visible to the human eye or spectrophotometrically, to identify specific hybridization with complementary nucleic acid-containing samples.

[0071] Examples of fluorophores include, but are not limited to, Alexa 350, Alexa 430, AMCA, BODIPY 630/650, BODIPY 650/665, BODIPY-FL, BODIPY-R6G, BODIPY-TMR, BODIPY-TRX, Cascade Blue, Cy2, Cy3, Cy5, 6-FAM, Fluoroscein, HEX, 6-JOE, Oregon Green 488, Oregon Green 500, Oregon Green 514, Pacific Blue, REG, Rhodamine Green, Rhodamine Red, ROX, TAMRA, TET, Tetramethylrhodamine, and Texas Red.

[0072] As mentioned above, a label may be incorporated into nucleic acid, e.g., cRNA, when it is transcribed. For example, the cRNA may be transcribed in the presence of biotin-ribonucleotides. The BioArray High Yield RNA Transcript Labeling Kit (Enzo Diagnostics) is a commercially available kit for biotinylating cRNA.

[0073] Means of detecting such labels are well known to those of skill in the art. For example, radiolabels may be detected using photographic film or scintillation counters. In other examples, fluorescent markers may be detected using a photodetector to detect emitted light. In still further examples, enzymatic labels are detected by providing the enzyme with a substrate and detecting the reaction product produced by the action of the enzyme on the substrate, and colorimetric labels are detected by simply visualizing the colored label.

[0074] So called “direct labels” are detectable labels that are directly attached to or incorporated into the target (sample) nucleic acid prior to hybridization. In contrast, so called “indirect labels” are joined to the hybrid duplex after hybridization. Often, the indirect label is attached to a binding moiety that has been attached to the target nucleic acid prior to the hybridization. Thus, for example, the target nucleic acid may be biotinylated before the hybridization. After hybridization, an avidin-conjugated fluorophore will bind the biotin-bearing hybrid duplexes providing a label that is easily detected. For a detailed review of methods of labeling nucleic acids and detecting labeled hybridized nucleic acids see Laboratory Techniques in Biochemistry and Molecular Biology (1993).

[0075] D. Hybridization

[0076] As used herein, “hybridization,” “hybridizes,” or “capable of hybridizing” is understood to mean the forming of a double or triple stranded molecule or a molecule with partial double or triple stranded nature. The term “anneal” as used herein is synonymous with “hybridize.” The term “hybridization,” “hybridizes,” or “capable of hybridizing” are related to the term “stringent conditions” or “high stringency” and the terms “low stringency” or “low stringency conditions.”

[0077] As used herein “stringent conditions” or “high stringency” are those conditions that allow hybridization between or within one or more nucleic acid strands containing complementary sequences, but precludes hybridization of random sequences. Stringent conditions tolerate little, if any, mismatch between a nucleic acid and a target strand. Such conditions are well known to those of ordinary skill in the art, and are preferred for applications requiring high selectivity. Non-limiting applications include isolating a nucleic acid, such as an mRNA or a nucleic acid segment thereof, or detecting at least one specific mRNA transcript or a nucleic acid segment thereof.

[0078] Stringent conditions may comprise low salt and/or high temperature conditions, such as provided by about 0.02 M to about 0.15 M NaCl at temperatures of about 50° C. to about 70° C. It is understood that the temperature and ionic strength of a desired stringency are determined in part by the length of the particular nucleic acids, the length and nucleobase content of the target sequences, the charge composition of the nucleic acids, and the presence or concentration of formamide, tetramethylammonium chloride or other solvents in a hybridization mixture.

[0079] It is also understood that these ranges, compositions and conditions for hybridization are mentioned by way of non-limiting examples only, and that the desired stringency for a particular hybridization reaction is often determined empirically by comparison to one or more positive or negative controls. Depending on the application envisioned it is preferred to employ varying conditions of hybridization to achieve varying degrees of selectivity of a nucleic acid towards a target sequence. In a non-limiting example, identification or isolation of a related target nucleic acid that does not hybridize to a nucleic acid under stringent conditions may be achieved by hybridization at low temperature and/or high ionic strength. Such conditions are termed “low stringency” or “low stringency conditions,” and non-limiting examples of low stringency include hybridization performed at about 0.15 M to about 0.9 M NaCl at a temperature range of about 20° C. to about 50° C. Of course, it is within the skill of one in the art to further modify the low or high stringency conditions to suite a particular application.

[0080] The hybridization conditions selected will depend on the particular circumstances (depending, for example, on the G+C content, type of target nucleic acid, source of nucleic acid, and size of hybridization probe). Optimization of hybridization conditions for the particular application of interest is well known to those of skill in the art. Representative solid phase hybridization methods are disclosed in U.S. Pat. Nos. 5,843,663, 5,900,481, and 5,919,626. Other methods of hybridization that may be used in the practice of the present invention are disclosed in U.S. Pat. Nos. 5,849,481, 5,849,486, and 5,851,772.

[0081] 1. DNA Chips and Microarrays

[0082] DNA arrays and gene chip technology provide a means of rapidly screening a large number of nucleic acid samples for their ability to hybridize to a variety of single stranded DNA probes immobilized on a solid substrate. These techniques involve quantitative methods for analyzing large numbers of genes rapidly and accurately. The technology capitalizes on the complementary binding properties of single stranded DNA to screen nucleic acid samples by hybridization (Pease et al., 1994; Fodor et al., 1991). Basically, a DNA array or gene chip consists of a solid substrate upon which an array of single stranded DNA molecules have been attached. For screening, the chip or array is contacted with a single stranded nucleic acid sample (e.g., cRNA), which is allowed to hybridize under stringent conditions. The chip or array is then scanned to determine which probes have hybridized.

[0083] The ability to directly synthesize on or attach polynucleotide probes to solid substrates is well known in the art. See U.S. Pat. Nos. 5,837,832 and 5,837,860, both of which are expressly incorporated by reference. A variety of methods have been utilized to either permanently or removably attach the probes to the substrate. Exemplary methods include: the immobilization of biotinylated nucleic acid molecules to avidin/streptavidin coated supports (Holmstrom, 1993), the direct covalent attachment of short, 5′-phosphorylated primers to chemically modified polystyrene plates (Rasmussen et al., 1991), or the precoating of the polystyrene or glass solid phases with poly-L-Lys or poly L-Lys, Phe, followed by the covalent attachment of either amino- or sulfhydryl-modified oligonucleotides using bi-functional crosslinking reagents (Running et al., 1990; Newton et al., 1993). When immobilized onto a substrate, the probes are stabilized and therefore may be used repeatedly.

[0084] In general terms, hybridization is performed on an immobilized nucleic acid target or a probe molecule that is attached to a solid surface such as nitrocellulose, nylon membrane or glass. Numerous other matrix materials may be used, including reinforced nitrocellulose membrane, activated quartz, activated glass, polyvinylidene difluoride (PVDF) membrane, polystyrene substrates, polyacrylamide-based substrate, other polymers such as poly(vinyl chloride), poly(methyl methacrylate), poly(dimethyl siloxane), photopolymers (which contain photoreactive species such as nitrenes, carbenes and ketyl radicals capable of forming covalent links with target molecules).

[0085] The Affymetrix GeneChip system may be used for hybridization and scanning of the probe arrays. In a preferred embodiment, the Affymetrix U133A array is used in conjunction with Microarray Suite 5.0 for data acquisition and preliminary analysis.

[0086] 2. Normalization Controls

[0087] Normalization controls are oligonucleotide probes that are complementary to labeled reference oligonucleotides that are added to the nucleic acid sample. The signals obtained from the normalization controls after hybridization provide a control for variations in hybridization conditions, label intensity, “reading” efficiency and other factors that may cause the hybridization signal to vary between arrays. For example, signals read from all other probes in the array can be divided by the signal from the control probes thereby normalizing the measurements.

[0088] Virtually any probe may serve as a normalization control. However, it is recognized that hybridization efficiency varies with base composition and probe length. Preferred normalization probes are selected to reflect the average length of the other probes present in the array, however, they can be selected to cover a range of lengths. The normalization control(s) can also be selected to reflect the (average) base composition of the other probes in the array, however in a preferred embodiment, only one or a few normalization probes are used and they are selected such that they hybridize well (i.e. no secondary structure) and do not match any target-specific probes. Normalization probes can be localized at any position in the array or at multiple positions throughout the array to control for spatial variation in hybridization efficiently.

[0089] In a particular embodiment, a standard probe cocktail supplied by Affymetrix is added to the hybridization to control for hybridization efficiency when using Affymetrix Gene Chip arrays.

[0090] 3. Expression Level Controls

[0091] Expression level controls are probes that hybridize specifically with constitutively expressed genes in the sample. The expression level controls can be used to evaluate the efficiency of cRNA preparation.

[0092] Virtually any constitutively expressed gene provides a suitable target for expression level controls. Typically expression level control probes have sequences complementary to subsequences of constitutively expressed “housekeeping genes.”

[0093] In one embodiment, the ratio of the signal obtained for a 3′ expression level control probe and a 5′ expression level control probe that specifically hybridize to a particular housekeeping gene is used as an indicator of the efficiency of cRNA preparation. A ratio of 1-3 indicates an acceptable preparation.

[0094] E. Data Analysis

[0095] Embodiments of the invention include methods to predict pathological response (pCR) versus residual cancer (RD) in patients diagnosed cancer prior to, during, or after treatment with a therapeutic regime. A variety of methods are know in the art for assessing the level of gene expression, as well algorithms to express these determinations as predictors, any combination of which may be used with the described gene set. In certain aspects, the prediction data may consist of baseline microarray gene expression data generated by hybridization of gene chips, e.g., U133A Affymetrix Gene Chips, consisting of 22,283 distinct probe sets corresponding to 13,736 known genes. This analysis is initiated by collecting various patient samples, which may include both pCRs and RDs. In certain embodiments, an array that has been hybridized with a population of nucleic acids isolated from a sample is scanned, images quantified, and preprocessed using the dCHIP© software or functionally similar software. The resulting data is assessed for quality (Gold, 2003a and 2003b).

[0096] Combining profiles of gene expression over a wide array of transcripts has potentially more classification prediction power than relying on any single gene. This contention relies implicitly on the intricate nature of gene-to-gene interactions and the host of possible molecular characteristics captured in genome wide RNA expression. Therefore, the issue addressed is which algorithm provides the better classifier, or combination thereof, to predict outcome given baseline gene expression. The search for a classifier involves spanning two spaces: classification algorithms and predictor sets (genes). Searching the space of all possible combinations of classifiers and gene sets is infeasible. Therefore, constraints may be imposed on the search spaces by: (1) limiting the choice of classification algorithms to a small discrete set and (2) searching over nested ordered subsets of genes, ordered by a measure of relative change in gene expression between outcomes.

[0097] Classifiers include, but are not limited to diagonal linear discriminant analysis (DLDA), support vector machines (SVM), compound co-variate predictor (CCP), and k-nearest neighbor algorithm (KNN), for K used in this context as the number of nearest neighbors (NN's) may be 3, 5, 7, 9, 11, or 15 (see Pusztai et al., 2003). The choices for the K# of NNs is selected based on previous CV simulations with public data that suggested that Ks in this range are reasonable. SVM was examined previously with publicly available microarray data (Mukherjee et al., 2003). DLDA and KNN were compared with various microarray data sets (Dudoit et al., 2000). CCP was examined with cancer microarray data (Tibshirani et al., 2002). The inventors choose to treat KNN for each K as a distinct model, although in actuality these are of adaptations of KNN, K being an internal parameter to KNN. These classifiers have been described in detail elsewhere (Hastie et al., 2001).

[0098] The inventors ordered the predictors, i.e. probe sets, considering nested sets. These were added based on an empirically derived order. The inventors ranked these with the p-value of a two-group, unequal variance, t-statistic on the ranks of gene expression. The inventors estimated validation prediction performance as the criteria for choosing between classifiers and employed Monte Carlo Cross Validation (MC-CV) to estimate of classification prediction performance.

[0099] Stratified K-Fold MC-CV entailed (i) dividing the sample data into an N-N/K training data set and an N/K test data set, each with roughly equal relative proportions of the two outcome classes, (ii) training each classifier on the training set, and (iii) obtaining prediction performance from the test set, and repeating r times. This is displayed in Algorithm 1. The choice of K, not to be confused with the K# of NNs, is addressed below.

[0100] Algorithm 1 for stratified K-fold MC-CV includes (1) Divide data into an N-N/K sample training data set and a N/K sample test set, each with roughly equal relative proportions of each class; (2) Train model on training data set; (3) Measure and record prediction performance applying model to test data set; (4) Repeat steps 1-3 a total of r times; and (5) Summarize resulting r performance measures.

[0101] One of the preliminary questions was whether feature, or gene, selection should be an integral part of the MC-CV. Feature selection is discussed in more detail below. The inventors also examined how many MC-CV repetitions, r, to do. The inventors chose as a starting value r=100, with the rationale that the variation in the mean of a proportion summarizing performance would be little reduced beyond this point. However, the inventors further evaluated this choice beyond just mean performance. Choosing r the number of MC-CV iterations is discussed in more detail below.

[0102] The inventors also considered how to best choose K. Additionally, various methods for choosing a best classifier(s) and a gene set from the candidates were considered. For each MC-CV run the inventors recorded: accuracy (ACC), true positive fraction (TPF) or sensitivity, false positive fraction (FPF) or 1-specificity, positive predictive value (PPV) and negative predictive value (NPV) (Pepe et al., 2003). The inventors also recorded sample level performance to determine which samples were the most troublesome. In certain embodiments, the analysis was focused on ACC.

[0103] 1. Choosing K for K-Fold CV.

[0104] Initially, feature selection was not incorporated with CV. The genes were ranked using all training samples and included to form ever-larger nested predictor sets. The inventors considered K=10-fold cross validation (Leave-6-Out), K=2-fold cross validation (Leave-30-Out) and K=N (Leave-1-Out) Kohvai, 1995; Shoa, 1993). The inventors inspected these results to learn how much the mean ACC and the confidence interval of the ACC changed as a function of K. With K=10, K=2, and K=N, that for each classifier shown, the mean test ACC does not change dramatically with K. However, the spread in the confidence intervals of the ACC decreases substantially from the Leave-6-Out test to the Leave-30-Out test, indicating that the estimates are much more precise with Leave-30-Out cross validation.

[0105] Given that the spread was dramatically reduced for K=2 while at the same time mean ACC declined only slightly the inventors chose to use K=2 for subsequent MC-CV studies. Note, however, that this will only result in prediction performance for training set sizes of N/2. The inventors do not expect steep learning curves and therefore, this is considered reasonable.

[0106] 2. Feature (Gene) Selection.

[0107] A BUM (Pounds and Morris, 2003) analysis using all samples resulted in an appreciable number of genes showing change between outcomes. There were 19 selected for a false discovery rate (FDR) of 1% and 150 for a FDR of 5%.

[0108] In certain embodiments, feature selection is included within MC-CV iterations, as described above, and may result in a more honest assessment of the prediction performance. This would entail for every split of the data into training and test set, re-ranking the genes based on the training data alone. Repeating the gene ranking each time does entail use of more CPU time and one time saver is to use the same r random samples in order to divide the data into training and test sets for each classifier/gene set. The main computing advantage is that one only needs to derive the ranks for each split once, store and access them over r iterations. An additional advantage is the reduction in confounding between the subsampling and factors for comparison. Hence, the rankings for r=100 random training sets were computed ahead of time and stored up front for use later.

[0109] The inventors examined the variability in ranks for leave out sets using MC-CV. There was much more variability past the top 100 genes. As the number of training samples increases, the inventors would hope for this variability to decline. Although, the feature selection using just a fraction of the 22,283 genes, for KNN (K=5), may produce overly optimistic results. Here the mean ACC's without feature selection or feature selection from just a subset of 1000 of the top genes are higher by as much as 5% in some ranges depending on the number of genes in the model.

[0110] In conclusion, incorporation of feature selection in MC-CV is an important devise for helping to better access achievable prediction performance. Feature selection preferably conducted using all 22,283 genes, rather than a subset, as the empirical evidence shows that this can make a difference in the end results and final decision.

[0111] 3. Choosing r the Number of MC-CV Iterations.

[0112] For several classifiers the mean and standard error estimates for 2-fold MC-CV with feature selection of 20 genes for up to r=300 show that convergence of the sample means is reasonable after r=100 repetitions, although the standard errors do not begin to calm until after 200 repetitions. The inventors selected r that would allow a sample of sufficient size to estimate the ACC sample mean and standard error, while saving the extra computing time that would be required for more repetitions. Moreover, this would reduce the standard error in the mean ACC estimate to a level that was sufficiently low.

[0113] 4. Choosing the Classifier.

[0114] To define the best predictors, the inventors postulated that classifiers with mean ACCs within 1 standard deviation of the single best should also be considered as best candidates. In 2-fold MC-CV with feature selection, KNN k=7 achieved the highest accuracy of 76% at 20 genes with a 1 standard error lower bound of 69% (FIG. 8). Each of the other KNN classifiers achieved above this lower bound as well as SVM with greater than 15 genes. Any of these predictors can be considered as a good candidate for best predictor.

[0115] Without including feature selection in the models, SVM achieved the best ACC of 89% with 125 genes and standard error of 0.04 (FIG. 9). However, those results are conditional upon the gene ranks using all 60 samples to perform the t-tests, ranks that are a random sample from a larger population. K-NN k=7 with 20 genes showed ACC of 78%. What these show is that KNN K=7 stands up as more robust in the face of uncertainty due to feature selection, for training sample sizes of 30, than SVM. The preferred final classifier was k-NN k=7 because it is predicted to perform better in achieving high ACC in the face of not only uncertainty in validation prediction (estimated with MC-CV) but also with the feature selection (estimated with MC-CV including feature selection) as well.

[0116] 5. Permutation Testing of the Best Classifier

[0117] Permutation testing of classification accuracy (ACC) is a powerful method to assess whether or not the accuracy that is achieved in a given study was significant (Mukherjee et al., 2003). The method begins with Algorithm 1 followed by permutation of class labels (i.e. response outcome), repeating Algorithm 1 Q times and comparing the original accuracy with those obtained via permutation, ACCqPERM q=1, . . . , Q.

[0118] Typically, the comparison is achieved by calculating the percentage of cases for which ACC is greater than or equal to ACCPERM. This measure is taken to be an empirical estimate of the p-value. For large Q it can be shown that in many situations this method is unbiased and robust against alternatives that do not take into account the underlying unique structure of the data (Good, 1994).

[0119] Permutation testing of ACC using Algorithm 2 includes (1) Perform Algorithm 1 and summarize ACC; (2) Randomly permute the class labels; (3) Repeat Algorithm 1, recording ACC^{PERM} at each run; (4) Repeat steps 2-3 Q times; and (5) Summarize comparison of ACC with ACC^{PERM} obtained by permuting the labels.

[0120] Significance in this case is a measure of whether or not the ACC achieved was better than chance, e.g. the permutation test. In the case of two groups with balance, i.e. the number of replicates in both groups equal, the null hypothesis with the permutation testing is defined as Ho: ACCTRUE=50% versus the alternative that Ha: ACCTRUE>50%. Hence, ACC arbitrarily close to 50% may be rejected as significant with enough samples, i.e. power, although ACC this low is rarely practical in medical decision making.

II. Isolated Nucleic Acids for Analysis or Therapy

[0121] Nucleic acids of the present may be utilized in the preparation of therapeutic compositions. Certain genes related to the sensitivity of a cell to therapy that are expressed in a cell sensitive to therapy may be used therapeutically by increasing the expression of this gene or activity of an encoded protein in a cancer cell. Other genes related to resistance of a cell to a therapy may be down regulated transcriptionally or inhibited at the protein level by various therapies, such as anti-sense nucleic acid methods or small molecules. The protein products of these genes may also be targets for small molecules and the like, to either increase activity of a sensitizing protein or decrease activity of a resistance protein. Therapeutics that target the transcription of a gene, translation of RNA, and/or activity of an encoded protein may be used to sensitize cells to therapy, or in other aspects, may be used as a primary therapeutic apart from or in combinations with other therapies.

[0122] Nucleic acids of the present invention include nucleic acid isolated from a sample, probes, or expression vectors for both analysis of tumor responsiveness to therapy and cancer therapy. Certain embodiments of the present invention include the evaluation of the expression of one or more nucleic acids of SEQ ID NOS: 1-193. In certain embodiments, wild-type, variants, or both wild-type and variants of these sequences are employed. In particular aspects, a nucleic acid encodes for or comprises a transcribed nucleic acid. In other aspects, a nucleic acid comprises a nucleic acid segment of one or more of SEQ ID NOS: 1-193, or a biologically functional equivalent thereof.

[0123] The term “nucleic acid” is well known in the art. A “nucleic acid” as used herein will generally refer to a molecule (i.e., a strand) of DNA, RNA or a derivative or analog thereof, comprising a nucleobase. A nucleobase includes, for example, a naturally occurring purine or pyrimidine base found in DNA (e.g., an adenine “A,” a guanine “G,” a thymine “T” or a cytosine “C”) or RNA (e.g., an A, a G, an uracil “U” or a C). “Nucleic acid” encompass the terms “oligonucleotide” and “polynucleotide,” each as a subgenus of the term “nucleic acid.” The term “oligonucleotide” refers to a molecule of between about 8 and about 100 nucleobases in length. The term “polynucleotide” refers to at least one molecule of greater than about 100 nucleobases in length.

[0124] In, certain embodiments, a “gene” refers to a nucleic acid that is transcribed. In certain aspects, the gene includes regulatory sequences involved in transcription, or message production or composition. In particular embodiments, the gene comprises transcribed sequences that encode for a protein, polypeptide or peptide. The term “gene” includes both genomic sequences, RNA or cDNA sequences or smaller engineered nucleic acid segments, including non-transcribed nucleic acid segments, including but not limited to the non-transcribed promoter or enhancer regions of a gene. Smaller engineered nucleic acid segments may encode proteins, polypeptides, peptides, fusion proteins, mutants and the like.

[0125] A polynucleotide of the invention may form an “expression cassette.” An “expression cassette” is polynucleotide that provides for the expression of a particular transcription unit. A transcription unit may include promoter elements and various other elements that function in the transcription of a gene or transcription unit, such as a polynucleotide encoding all or part of a therapeutic protein. An expression cassette may also be part of a larger replicating polynucleotide or expression vector.

[0126] “Isolated substantially away from other coding sequences” means that the nucleic acid does not contain large portions of naturally-occurring coding nucleic acids, such as large chromosomal fragments, other functional genes, RNA or cDNA coding regions. Of course, this refers to the nucleic acid as originally isolated, and does not exclude genes or coding regions later added to the nucleic acid by the hand of man.

[0127] A. Expression Constructs

[0128] Expression constructs of the invention may include nucleic acids encoding a protein or polynucleotide for use in cancer therapy. In certain embodiments, genetic material may be manipulated to produce expression cassettes and expression constructs that encode the nucleic acids or inhibitors of the nucleic acids of the invention. Throughout this application, the term “expression construct” is meant to include any type of genetic construct containing a nucleic acid coding for gene products in which part or all of the nucleic acid encoding sequence is capable of being transcribed. The transcript may be translated into a protein, but it need not be. In certain embodiments, expression includes both transcription of a gene and translation of mRNA into a gene product. In other embodiments, expression only includes transcription of therapeutic genes.

[0129] A therapeutic vector of the invention comprises a therapeutic gene for the prophylatic or therapeutic treatment of neoplastic, hyperplastic, or cancerous condition. In order to mediate the expression of a therapeutic gene in a cell, it will be necessary to transfer the therapeutic expression constructs into a cell. Such transfer may employ viral or non-viral methods of gene transfer. Gene transfer may be accomplished using a variety of techniques known in the art, including but not limited to adenovirus, various retroviruses, adeno-associated virus, vaccinia virus, canary pox virus, herpes viruses or other non-viral methods of nucleic acid delivery.

[0130] Various methods and compositions for nucleic acid transfer, both ex vivo and in vivo may be found in the following references: Carter and Flotte, 1996; Ferrari et al., 1996; Fisher et al., 1996; Flotte et al., 1993; Goodman et al., 1994; Kaplitt et al., 1994; 1996, Kessler et al., 1996; Koeberl et al., 1997; Mizukami et al., 1996; Xiao et al., 1996; McCown et al., 1996; Ping et al., 1996; Ridgeway, 1988; Baichwal and Sugden, 1986; Coupar et al., 1988. Other methods of gene transfer include calcium phosphate precipitation (Graham and Van Der Eb, 1973; Chen and Okayama, 1987; Rippe et al., 1990) DEAE-dextran (Gopal, 1985), electroporation (Tur-Kaspa et al., 1986; Potter et al., 1984), direct microinjection (Harland and Weintraub, 1985), DNA-loaded liposomes (Nicolau and Sene, 1982; Fraley et al., 1979), cell sonication (Fechheimer et al., 1987), gene bombardment using high velocity microprojectiles (Yang et al., 1990), naked DNA expression construct (Klein et al., 1987; Yang et al., 1990), Liposomes (Ghosh and Bachhawat, 1991; Radler et al., 1997; Nicolau et al. 1987; Kaneda et al., 1989; Kato et al., 1991) and receptor-mediated transfection (Wu and Wu, 1987; Wu and Wu, 1988).

[0131] 1. Control Regions

[0132] Expression cassettes or constructs of the invention, encoding a therapeutic gene will typically include various control regions. These control regions typically modulate the expression of the gene of interest. Control regions include promoters, enhancers, polyadenylation signals, and translation terminators. A “promoter” refers to a DNA sequence recognized by the machinery of the cell, or introduced machinery, required to initiate the specific transcription of a gene. In particular aspects, transcription may be constitutive, inducible, and/or repressible. The phrase “under transcriptional control” means that the promoter is in the correct location and orientation in relation to the nucleic acid to control RNA polymerase initiation and expression of the gene.

[0133] In various embodiments, the human cytomegalovirus immediate early gene promoter (CMVIE), the SV40 early promoter, the Rous sarcoma virus long terminal repeat, β-actin, rat insulin promoter and glyceraldehyde-3-phosphate dehydrogenase can be used to obtain high-level expression of the coding sequence of interest. The use of other viral, retroviral or mammalian cellular or bacterial phage promoters, which are well-known in the art to achieve expression of a coding sequence of interest is contemplated as well, provided that the levels of expression are sufficient for a given purpose. By employing a promoter with well-known properties, the level and pattern of expression of the protein of interest following transfection or transformation can be optimized.

[0134] Selection of a promoter that is regulated in response to specific physiologic or synthetic signals can permit inducible expression of the gene product. For example in the case where expression of a transgene, or transgenes when a multicistronic vector is utilized, is toxic to the cells in which the vector is produced in, it may be desirable to prohibit or reduce expression of one or more of the transgenes. Examples of transgenes that may be toxic to the producer cell line are pro-apoptotic and cytokine genes. Several inducible promoter systems are available for production of viral vectors where the transgene product may be toxic. For example, the ecdysone system (Invitrogen, Carlsbad, Calif.) and Tet-Off™ or Tet-On™ system (Clontech, Palo Alto, Calif.) are two such systems.

[0135] In some circumstances, it may be desirable to regulate expression of a transgene in a therapeutic expression vector. For example, different viral promoters with varying strengths of activity may be utilized depending on the level of expression desired. In mammalian cells, the CMV immediate early promoter if often used to provide strong transcriptional activation. Modified versions of the CMV promoter that are less potent have also been used when reduced levels of expression of the transgene are desired. When expression of a transgene in hematopoietic cells is desired, retroviral promoters such as the LTRs from MLV or MMTV are often used. Other viral promoters that may be used depending on the desired effect include SV40, RSV LTR, HIV-1 and HIV-2 LTR, adenovirus promoters such as from the E1A, E2A, or MLP region, AAV LTR, cauliflower mosaic virus, HSV-TK, and avian sarcoma virus.

[0136] Similarly tissue specific promoters may be used to effect transcription in specific tissues or cells so as to reduce potential toxicity or undesirable effects to non-targeted tissues. For example, promoters such as the PSA, probasin, prostatic acid phosphatase or prostate-specific glandular kallikrein (hK2) may be used to target gene expression in the prostate. Similarly, the following promoters may be used to target gene expression in other tissues.

[0137] Tumor specific promoters such as osteocalcin, hypoxia-responsive element (HRE), MAGE-4, CEA, alpha-fetoprotein, GRP78/BiP and tyrosinase may also be used to regulate gene expression in tumor cells.

[0138] It is envisioned that any of the above promoters alone or in combination with another may be useful according to the present invention depending on the action desired. In addition, this list of promoters should not be construed to be exhaustive or limiting, those of skill in the art will know of other promoters that may be used in conjunction with the promoters and methods disclosed herein.

[0139] Enhancers may also be utilized in construction of an expression vector. Enhancers are genetic elements that increase transcription from a promoter located at a distant position on the same molecule of DNA. Enhancers are organized much like promoters. That is, they are composed of many individual elements, each of which binds to one or more transcriptional proteins. The basic distinction between enhancers and promoters is operational. An enhancer region as a whole must be able to stimulate transcription at a distance; this need not be true of a promoter region or its component elements. On the other hand, a promoter must have one or more elements that direct initiation of RNA synthesis at a particular site and in a particular orientation, whereas enhancers lack these specificities. Promoters and enhancers are often overlapping and contiguous, often seeming to have a very similar modular organization.

[0140] Polyadenylation signals may be used in therapeutic expression vectors. Where a cDNA insert is employed, one will typically desire to include a polyadenylation signal to effect proper polyadenylation of the gene transcript. The nature of the polyadenylation signal is not believed to be crucial to the successful practice of the invention, and any such sequence may be employed such as human or bovine growth hormone and SV40 polyadenylation signals. Also contemplated as an element of the expression cassette is a terminator. These elements can serve to enhance message levels and to minimize read through from the cassette into other sequences.

[0141] B. Therapeutic Genes

[0142] Genes identified as either sensitizing genes or resistance genes may be targeted for therapeutic expression or repression, respectively. The present invention contemplates the use of a variety of different therapeutic genes. For example, genes encoding enzymes, hormones, cytokines, oncogenes, receptors, ion channels, tumor suppressors, transcription factors, drug selectable markers, toxins, various antigens, anti-sense polyunucleotide and other inhibitors of gene expression are contemplated for use according to the present invention. In certain embodiments, a therapeutic gene may encode an anti-sense polynucleotide, siRNA, or ribozymes that interfere with the function of DNA and/or RNA. Interference may result in suppression of expression, in particular aspects expression of Tau protein. The presence or expression of such a polynucleotide or derivative thereof in a cell will typically alter the expression or function of cellular genes or RNA.

[0143] C. Multigene Constructs and IRES

[0144] In certain embodiments of the invention, the use of internal ribosome binding sites (IRES) elements are used to create multigene, polycistronic messages. IRES elements are able to bypass the ribosome scanning model of 5′-methylated, Cap-dependent translation and begin translation at internal sites (Pelletier and Sonenberg, 1988). RES elements from two members of the picanovirus family (polio and encephalomyocarditis) have been described (Pelletier and Sonenberg, 1988), as well an IRES from a mammalian message (Macejak and Sarnow, 1991). IRES elements can be linked to heterologous open reading frames. Multiple genes can be efficiently expressed using a single promoter/enhancer to transcribe a single message. Any heterologous open reading frame can be linked to IRES elements. This includes genes for therapeutic proteins and selectable markers. In this way, expression of several proteins can be simultaneously engineered into a cell with a single construct and a single selectable marker.

[0145] D. Preparation of Nucleic Acids

[0146] In addition to the preparation of nucleic acids from a tumor sample and isolated nucleic acid may be prepared as follows. An isolated nucleic acid may be made by any technique known to one of ordinary skill in the art, such as for example, chemical synthesis, enzymatic production, or biological production. Non-limiting examples of a synthetic nucleic acid (e.g., a synthetic oligonucleotide), include a nucleic acid made by in vitro chemical synthesis using phosphotriester, phosphite, or phosphoramidite chemistry; and solid phase techniques such as described in EP 266 032, incorporated herein by reference, or via deoxynucleoside H-phosphonate intermediates as described by Froehler et al., 1986 and U.S. Pat. No. 5,705,629, each incorporated herein by reference. In the methods of the present invention, one or more oligonucleotides may be used. Various different mechanisms of oligonucleotide synthesis have been disclosed in for example, U.S. Pat. Nos. 4,659,774, 4,816,571, 5,141,813, 5,264,566, 4,959,463, 5,428,148, 5,554,744, 5,574,146, 5,602,244, each of which are incorporated herein by reference.

[0147] A non-limiting example of an enzymatically produced nucleic acid include one produced by enzymes in amplification reactions such as PCR™ (see for example, U.S. Pat. No. 4,683,202 and U.S. Pat. No. 4,682,195, each incorporated herein by reference), or the synthesis of an oligonucleotide described in U.S. Pat. No. 5,645,897, incorporated herein by reference. A non-limiting example of a biologically produced nucleic acid includes a recombinant nucleic acid produced (i.e., replicated) in a living cell, such as a recombinant DNA vector replicated in bacteria (see for example, Sambrook et al. 2001, incorporated herein by reference).

[0148] E. Purification of Nucleic Acids

[0149] A nucleic acid may be purified on polyacrylamide gels, cesium chloride centrifugation gradients, affinity columns, or by any other means known to one of ordinary skill in the art (see for example, Sambrook et al., 2001, incorporated herein by reference).

[0150] In certain aspect, the present invention concerns a nucleic acid that is an isolated nucleic acid. As used herein, the term “isolated nucleic acid” refers to a nucleic acid molecule (e.g., an RNA or DNA molecule) that has been isolated free of, or is otherwise free of, the bulk of the total genomic and transcribed nucleic acids of one or more cells. In certain embodiments, “isolated nucleic acid” refers to a nucleic acid that has been isolated free of, or is otherwise free of, bulk of cellular components or in vitro reaction components such as for example, macromolecules such as lipids or proteins, small biological molecules, and the like.

[0151] 1. Nucleic Acid Segments

[0152] In certain embodiments, the nucleic acid is a nucleic acid segment. As used herein, the term “nucleic acid segment,” are smaller fragments of a nucleic acid, such as those that encode only part of the SEQ ID NOS: 1-193. Thus, a “nucleic acid segment” may comprise any part of a gene sequence, from about 8 nucleotides to the full length of the SEQ ID NOS: 1-193.

[0153] Various nucleic acid segments may be designed based on a particular nucleic acid sequence, and may be of any length. By assigning numeric values to a sequence, for example, the first residue is 1, the second residue is 2, etc., an algorithm defining all nucleic acid segments can be created:
[0154] n to n+y
[0155] where n is an integer from 1 to the last number of the sequence and y is the length of the nucleic acid segment minus one, where n+y does not exceed the last number of the sequence. Thus, for a 10-mer, the nucleic acid segments correspond to bases 1 to 10, 2 to 11, 3 to 12 . . . and so on. For a 15-mer, the nucleic acid segments correspond to bases 1 to 15, 2 to 16, 3 to 17 . . . and so on. For a 20-mer, the nucleic segments correspond to bases 1 to 20, 2 to 21, 3 to 22 . . . and so on. In certain embodiments, the nucleic acid segment may be a probe or primer. This algorithm would be applied to each of SEQ ID NOS: 1-193. As used herein, a “probe” generally refers to a nucleic acid used in a detection method or composition. As used herein, a “primer” generally refers to a nucleic acid used in an extension or amplification method or composition.

[0156] In a non-limiting example, one or more nucleic acid constructs may be prepared that include a contiguous stretch of nucleotides identical to or complementary to one or more of SEQ ID NOS: 1-193. A nucleic acid construct may be about 8, 9, 10, 11, 12, 13, 14, 15, 16, 17, 18, 19, 20, 21, 22, 23, 24, 25, 26, 27, 28, 29, 30, 31, 32, 33, 34, 35, 36, 37, 38, 39, 40, 41, 42, 43, 44, 45, 46, 47, 48, 49, 50, about 60, about 70, about 80, about 90, about 100, about 200, about 500, about 1,000, about 2,000, about 3,000, about 5,000, about 10,000, about 15,000, about 20,000, about 30,000, about 50,000, about 100,000, about 250,000, about 500,000, about 750,000, to about 1,000,000 nucleotides in length, as well as constructs of greater size, up to and including chromosomal sizes (including all intermediate lengths and intermediate ranges), given the advent of nucleic acids constructs such as a yeast artificial chromosome are known to those of ordinary skill in the art. It will be readily understood that “intermediate lengths” and “intermediate ranges,” as used herein, means any length or range including or between the quoted values (i.e., all integers including and between such values).

III. Pharmaceutical Compositions and Routes of Administration

[0157] Where clinical applications are contemplated, it will be necessary to prepare pharmaceutical compositions of the therapeutic compositions in a form appropriate for the intended application. Generally, this will entail preparing compositions that are essentially free of pyrogens, as well as other impurities that could be harmful to humans or animals.

[0158] One will generally desire to employ appropriate salts and buffers to render the compositions suitable for introduction into a patient. Aqueous compositions of the present invention comprise an effective amount of the gene delivery agent dissolved or dispersed in a pharmaceutically acceptable carrier or aqueous medium. The phrase “pharmaceutically or pharmacologically acceptable” refer to molecular entities and compositions that do not produce adverse, allergic, or other untoward reactions when administered to an animal or a human.

[0159] As used herein, “pharmaceutically acceptable carrier” includes any and all solvents, dispersion media, coatings, antibacterial and antifungal agents, isotonic and absorption delaying agents and the like. The use of such media and agents for pharmaceutically active substances for gene delivery agents are well know in the art. Except insofar as any conventional media or agent is incompatible with the vectors or cells of the present invention, its use in therapeutic compositions is contemplated.

[0160] An effective amount of the composition is determined based on the intended goal. The term “unit dose” refers to a physically discrete unit suitable for use in a subject, each unit containing a predetermined quantity of the therapeutic composition calculated to produce the desired response in association with its administration, i.e., the appropriate route and treatment regimen. The quantity to be administered, both according to number of treatments and unit dose, depends on the subject to be treated, the state of the subject, and the protection desired. Precise amounts of the therapeutic composition also depend on the judgment of the practitioner and are peculiar to each individual.

[0161] Also contemplated are combination compositions that contain two active ingredients. In particular, the present invention provides for compositions that contain expression vector compositions and at least a second therapeutic, for example, an anti-neoplastic drug.

[0162] For parenteral administration in an aqueous solution, for example, the solution should be suitably buffered if necessary and the liquid diluent first rendered isotonic with sufficient saline or glucose. These particular aqueous solutions are especially suitable for intravenous, intramuscular, subcutaneous, and intraperitoneal administration. In this connection, sterile aqueous media can be employed and is known to those of skill in the art. For example, one dosage could be dissolved in 1 ml of isotonic NaCl solution and either added to 1000 ml of hypodermoclysis fluid or injected at the proposed site of infusion, (see for example, “Remington's Pharmaceutical Sciences” 15th Edition, pages 1035-1038 and 1570-1580). Some variation in dosage will necessarily occur depending on the condition of the subject being treated. The person responsible for administration will, in any event, determine the appropriate dose for the individual subject.

### EXAMPLES

[0163] The following examples are included to demonstrate preferred embodiments of the invention. It should be appreciated by those of skill in the art that the techniques disclosed in the examples which follow represent techniques discovered by the inventor to function well in the practice of the invention, and thus can be considered to constitute preferred modes for its practice. However, those of skill in the art should, in light of the present disclosure, appreciate that many changes can be made in the specific embodiments which are disclosed and still obtain a like or similar result without departing from the spirit and scope of the invention.

### Example 1

### Identification of Responsiveness Genes and Development of Multi-Gene Predictors of Response to Chemotherapy

[0164] Methods

[0165] The inventors have identified a set of 193 genes that are differentially expressed between breast cancers that are highly chemotherapy sensitive and those which are less sensitive. These genes were identified by comprehensive gene expression profiling using Affymetrix U133A and B gene chips on fine needle aspiration specimens of at least 85 human breast cancers obtained at the time of diagnosis, before therapy. All patients received sequential weekly paclitaxel (P)×12 followed by 4 additional courses of 5-FU, doxorubicine, and cyclophosphamide (FAC) preoperative chemotherapy. These 193 genes, including subsets of these genes, combined with a prediction algorithm can be used to identify patients at the time of diagnosis who have better than average probability to experience complete eradication of the cancer (pathologic complete response, pCR) to P/FAC chemotherapy.

[0166] Patient Population. All patients were enrolled in a clinical trial at M.D. Anderson Cancer Center (LAB99-402). Patients were grouped into two groups based on pathologic response outcome determined by pathologic examination of the surgically resected breast tissues after completion of six months of chemotherapy. Twenty-one of 82 patients had pathologic complete response (pCR) and 61 of 82 patients had residual disease (RD). The chemotherapy consisted of weekly paclitaxel 80 mg/m²×12 courses followed by four additional treatments with a combination of 5-fluorouracil (500 mg/m²), doxorubicin (50 mg/m²) 72-hour infusion, and cyclophosphamide (500 mg/m²) given once every 3 weeks. All patients received 24 weeks of sequential T/FAC chemotherapy and subsequently underwent lumpectomy or modified radical mastectomy with axillary node sampling as determined appropriate by the surgeon. Metallic markers had been placed under radiological guidance in the shrinking tumor bed for any patient whose tumor became <1 cm by imaging during the course of treatment. Clinical characteristics and treatment history are presented in Table 2. At the completion of neoadjuvant chemotherapy all patients had surgical resection of the tumor bed, with negative margins. Grossly visible residual cancer was measured and representative sections were submitted for histopathologic study. When there was not grossly visible residual cancer, the slices of the specimen were radiographed and all areas of radiologically and/or architecturally abnormal tissue were entirely submitted for histopathologic study. This study was approved by the institutional review board (IRB) of MDACC and all patients signed an informed consent for voluntary participation.

[0167] Fine Needle Aspiration. Fine needle aspiration (FNA) was performed using a 23 or 25-gauge aspiration needle (local anesthesia with ethyl chloride spray). Four to six FNA passes were obtained and two passes of each placed into separate vials containing 0.5 ml RNAlater™ solution (Ambion, Austin, Tex.) and mixed thoroughly. The samples in RNAlater™ solution were kept at room temperature for 20-30 minutes then snap frozen and stored at −80° C.

[0168] One cytologic smear was prepared from the last FNA by placing a drop of cellular material on a silane-coated slide and air-dried. The adequacy and cellularity of the sample was assessed by examining the DiffQuik (Baxter Scientific, Illinois, U.S.A)-stained cytologic smear under the microscope. Typically, an FNA specimen contains 78-90% neoplastic cells, few infiltrating leukocytes and few red cells. These samples contain little or no stromal cells (fibroblast, adipocyes) or normal breast epithelium.

[0169] RNA Extraction. The Qiagen Rneasy Mini Kit Cat # 74104 was used for RNA extraction from the FNA samples that were stored in RNAlater™ solution at −80° C. The samples were thawed on ice and then spun in a 5415C eppendorf centrifuge at 10,000 rpm for 5 minutes.

[0170] As much of the supernatant as possible (approx. 900 ul) was carefully removed and transfered to a new 1.5 ml eppendorf tube labeled with the patient ID. The supernatant was stored at −80° C. for future processing as it is possible to get RNA from the supernatant.

TABLE 2
Clinical information and demographics of the patients included in the
study (n = 82)

| | |
|---|---|
| Female | 82 (100%) |
| Median age | 52 years (range 29-79) |
| Race | |
| Caucasian | 56 (68%) |
| African American | 11 (13%) |
| Asian | 7 (9%) |
| Hispanic | 6 (7%) |
| Mixed | 2 (2%) |
| Histology | |
| Invasive ductal | 73 (89%) |
| Mixed ductal/lobular | 6 (7%) |
| Invasive lobular | 1 (1%) |
| Invasive mucinous | 2 (2%) |
| TNM stage | |
| T1 | 7 (9%) |
| T2 | 46 (56%) |
| T3 | 15 (18%) |
| T4 | 14 (17%) |
| N0 | 28 (34%) |
| N1 | 38 (46%) |
| N2 | 8 (10%) |
| N3 | 8 (10%) |
| Nuclear grade (BMN) | |
| 1 | 2 (2%) |
| 2 | 23 (37%) |
| 3 | 35 (61%) |
| ER positive¹ | 35 (43%) |
| ER negative | 47 (57%) |
| HER-2 positive² | 57 (70%) |
| HER-2 negative | 25 (30%) |
| Neoadjuvant therapy³ | |
| Weekly T (80 mg/m²) × 12 + FAC × 4 | 69 (84%) |
| 3-weekly T (225 mg/m CI) × 4 + FAC × 4 | 13 (16%) |
| Pathologic complete response (pCR) | 21 (26%) |
| Residual Disease (RD) | 61 (74%) |

¹Cases where ≧10% of tumor cells stained positive for ER with immunohistochemistry (IHC) were considered positive.
²Cases that showed either 3 + IHC staining or had gene copy number >2.0 were considered HER-2 “positive”.
³T stands for paclitaxel, FAC for 5-flurouracil, doxorubicin, and cyclophosphamide.

[0171] Next, 350 μl of RLT lysis buffer (Qiagen) was added to the cell pellet and mixed thoroughly by pippetting and vortexing. A quick spin down in the 5415C centrifuge at 14,000 rpm was performed, and the cells were transferred to a new 0.5 ml eppendorf tube labeled with the appropriate patient ID.

[0172] The cells were homogenized by passing through a 30.5G needle with a 1 ml syringe 10-20 times. After homogenization, the samples were vortexed and spun down. The homogenized sample was then transferred to a new 1.5 ml eppendorf tube labeled with the appropriate patient ID. Next, 350 ul of 70% ethanol solution was added to the sample and mixed by pippettintg.

[0173] Then 700 μl of the sample was applied to an RNeasy® mini column placed in a 2 ml collection tube. The tube was placed in the 5415C eppendorf centrifuge and spun at 14,000 rpm for 15 seconds. The flow through was discarded. 700 μl of buffer RW1 was then added to the RNeasy® column. The tube was centrifuged in the 5415C for 15 seconds at 14,000 rpm, and the flow through was discarded.

[0174] The RNeasy® column was transferred to a new 2 ml collection tube. 500 μl of Buffer RPE was pipetted onto the column. The tube was centrifuged in the 5415C for 15 seconds at 14,000 rpm to wash the column. The flow through was discarded.

[0175] The RNeasy® column was then transferred to another new 2 ml collection tube. 500 ul of Buffer RPE was pipetted onto the column. The tube was centrifuge in the 5415C for 2 minutes at 14,000 rpm. The flow through was discarded.

[0176] The RNeasy® mini column was then transferred to a 1.5 ml eppendorf tube. 40 μl of RNase free water was pipetted onto the middle of the silica membrane. The tube was spun in the 5415C centrifuge for 1 minute at 14,000 rpm to elute the RNA. The 40 μl elution was transferred back onto the RNeasy® mini column and spun for a second time in the 5415C centrifuge for 1 minute at 14,000 rpm.

[0177] The 40 μl volume sample was then concentrated in a Sorvall speed-vac to a final volume of 10-15 μl.

[0178] To determine the amount of RNA in the sample, a 1:50 dilution of the sample was diluted in a total volume of 50 μl in a miniature cuvette (Beckman), and the amount and quality of RNA was assessed with DU-640 U.V. Spectrophotometer (Beckman Coulter, Fullerton, Calif.). It was considered adequate for further analysis if the OD 260/280 ratio was >1.8 and the total RNA yield was >1 μg. Median RNA yield of the 85 specimens was 2.0 μg with a range of 1 μg-22 μg. Between 0.9 μg to 1.1 μg total RNA in a 9 μl volume was used for Affymetrix Labeling.

[0179] Affymetrix Probe Preparations and Hybridization. All procedures followed standard operating practice described in the Affymetrix technical manual. Briefly, total RNA was reverse-transcribed with SuperScript II in the presence of T7-(dT)₂₄ primer to generate first strand cDNA. A second-strand cDNA synthesis was performed in the presence of DNA Polymerase I, DNA ligase, and RNase H. The resulting double-stranded cDNA was blunt-ended using T4 DNA polymerase and purified by phenol/chloroform extraction. This double-stranded cDNA was transcribed into cRNA in the presence of biotin-ribonucleotides using the BioArray High Yield RNA transcript labeling kit (Enzo Laboratories). The biotin labeled cRNA was purified using Qiagen RNeasy columns and quantified. A minimum of 10 μg cRNA is required in order to proceed with fragmentation and hybridization.

[0180] cRNA was fragmented at 94° C. for 35 minutes in the presence of 1× fragmentation buffer and then hybridized to Affymetrix U133A arrays overnight at 42° C. After hybridization, cRNA was recovered from the chips and stored at −80° C. The Affymetrix GeneChip system was used for hybridization and scanning of the probe arrays. Microarray Suite 5.0 was used for data acquisition and preliminary analysis. Grid alignment was checked by plotting the signal of positive and negative controls versus border position and the pixel-level coefficient of variation within each cell. Primary data was normalized to the median of each chip by setting the median value to 1000 and log 2 transformed for further analysis.

[0181] QC process for cRNA labeling and hybridization. To control for hybridization efficiency a standard probe cocktail supplied by Affymetrix was spiked into the hybridization mix. After hybridization and staining of the chip, the signal analysis software checks for successful hybridization present at the cells corresponding to the spiked-in cRNA. The expression of known housekeeping genes represented on the chip was also examined to evaluate the efficiency of cRNA preparation. For housekeeping genes on the chip a ratio of the signal obtained for 3′ and 5′ probes was used as an indicator of the efficiency of cRNA preparation. A ratio of 1-3 indicates an acceptable preparation of cRNA. Several standard global quality metrics were also examined to further assure good quality data. To assess brightness, dCHIP software was used to generate % of array-outliers and % single-outliers for each chip. Affymetrix MAS 5.0 software was used to produce p-values for signal detection. These were compared to all the rest of the existing profiles. Chips with greater than 5% array- or single-outliers or with less than 15% detection p-values of <0.01 were flagged and discarded from further analysis. The median of the median intensities over all the arrays was 163 with a range of 228 and a standard deviation of 42.9. Three chips failed the QC process and subsequent analysis was performed on 82 samples.

[0182] Microarray data analysis. The inventors' goal was to predict pathological response (pCR) versus residual cancer (RD) in patients with newly diagnosed breast cancer following neoadjuvant therapy. The prediction data consisted of baseline microarray gene expressions generated by U133A Affymetrix Gene Chips, consisting of 22,283 distinct probe sets, i.e. distinct target sequences, corresponding to 13,736 known genes. This analysis was based on 82 patient samples, 21 pCRs and 61 RDs. The scanned images were quantified and then preprocessed using the dCHIP© software. The resulting data was assessed for quality. Data preprocessing and quality control were discussed previously (Gold, 2003a and 2003b). dCHIP software was used for normalization; this program normalizes all arrays to one standard array that represents a chip with median overall intensity. After normalization, probe set level intensity estimates were generated as follows. Estimates of feature level intensity was derived from the 75th percentile of each features' pixel level intensities. Each individual probe is aggregated at the feature level to form a single measure of intensity for each probe set. The inventors used the perfect match model. Normalized gene expression values were transformed to the log-scale (base 10) for analysis. To identify informative genes differentially expressed between cases with pCR and those with residual disease, genes were ordered by p-values obtained with two-sample, unequal-variance t-tests.

[0183] Combining profiles of gene expression over a wide array of transcripts has potentially more classification prediction power than relying on any single gene. This contention relies implicitly on the intricate nature of gene-to-gene interactions and the host of possible molecular characteristics captured in genome wide RNA expression. Therefore, the issue addressed here is which algorithm provides the better classifier, or combination thereof, to predict outcome given baseline gene expression. The search for a classifier involved spanning two spaces: classification algorithms and predictor sets (genes). Searching the space of all possible combinations of classifiers and gene sets is infeasible. Therefore, constraints were imposed on the search spaces by: (1) limiting the choice of classification algorithms to a small discrete set and (2) searching over nested ordered subsets of genes, ordered by a measure of relative change in gene expression between outcomes.

[0184] Multigene classifiers were constructed using combinations of the most informative genes and several different class prediction algorithms including Support Vector Machines with linear, radial and polynomial kernels (SVM), Diagonal Linear Discriminant Analysis (DLDA), and K-Nearest Neighbor (KNN) using Euclidean distance (Hastie et al., 2001). Monte Carlo Cross Validation (CV) was used to estimate the prediction performance of the different classifiers in the training data and to facilitate selection of a final single best classifier for independent validation. Use of cross-validation avoids the optimism bias that occurs when the same data are used to assess the performance of a classifier and to train the classifier. The inventors examined the DLDA, SVM, CCP, and KNN, for K used in this context as the number of nearest neighbors (NN's) of 3, 5, 7, 9, 11, 15 classifiers. The choices for the K# of NNs was selected based on previous CV simulations with public data that suggested that Ks in this range are reasonable. SVM was examined previously with publicly available microarray data (Mukherjee et al., 2003). DLDA and KNN were compared with various microarray data sets (Dudoit et al., 2000). CCP was examined with cancer microarray data (Tibshirani et al., 2002). The inventors choose to treat KNN for each K as a distinct model, although in actuality these are of adaptations of KNN, K being an internal parameter to KNN. These classifiers have been described in detail elsewhere (Hastie et al., 2001).

[0185] The inventors ordered the predictors, i.e. probe sets, considering nested sets. These were added based on an empirically derived order. The inventors ranked these with the p-value of a two-group, unequal variance, t-statistic on the ranks of gene expression. The inventors estimated validation prediction performance as the criteria for choosing between classifiers and employed Monte Carlo Cross Validation (MC-CV) to estimate of classification prediction performance.

[0186] Stratified K-Fold MC-CV entailed (i) dividing the N=82 sample data into an N-N/K training data set and an N/K test data set, each with roughly equal relative proportions of the two outcome classes, (ii) training each classifier on the training set, and (iii) obtaining prediction performance from the test set, and repeating r times. This is displayed in Algorithm 1. The choice of K, not to be confused with the K# of NNs, is addressed below.

[0187] Algorithm 1 for stratified K-fold MC-CV includes (1) Divide data into an N-N/K sample training data set and a N/K sample test set, each with roughly equal relative proportions of each class; (2) Train model on training data set; (3) Measure and record prediction performance applying model to test data set; (4) Repeat steps 1-3 a total of r times; and (5) Summarize resulting r performance measures.

[0188] One of the preliminary questions was whether feature, or gene, selection should be an integral part of the MC-CV. Feature selection is discussed in more detail below. The inventors also examined how many MC-CV repetitions, r, to do. The inventors chose as a starting value r=100, with the rationale that the variation in the mean of a proportion summarizing performance would be little reduced beyond this point. However, the inventors further evaluated this choice beyond just mean performance. Choosing r the number of MC-CV iterations is discussed in more detail below.

[0189] The inventors also considered how to best choose K. Additionally, various methods for choosing a best classifier(s) and a gene set from the candidates were considered. For each MC-CV run the inventros recorded: accuracy (ACC), true positive fraction (TPF) or sensitivity, false positive fraction (FPF) or 1-specificity, positive predictive value (PPV) and negative predictive value (NPV) (Pepe et al., 2003). The inventors also recorded sample level performance to determine which samples were the most troublesome. The inventors focused their analysis here on ACC. Choosing the best classifier is discussed in more detail below.

[0190] Choosing K for K-fold CV. Cross validation was performed by repeated iteration (n=100) of stratified random sampling from a full data set to estimate expected performance for independent test cases. Stratification was performed to insure that the relative proportion of outcomes sampled in both cross-validation training and test sets was similar to the original proportions for the full training data. Gene sorting was included in the cross-validation to avoid selection bias (Ambroise and McLauchlan, 2002). The inventors performed 2-, 4-, 10-, 20-, and 40-fold CV but focus on 2-fold because it has lower variation in the performance estimates over the 100 iterations and this lower variation facilitates choosing among the competing classifiers. Classifier performance was assessed using overall misclassification error (MER), which is the proportion of samples misclassified and by using the complement of the area under the Receive Operator Characteristic curve (or area above the curve, AAC). The latter is generally considered a superior measure of performance because it offers a balance between sensitivity and specificity and is not dependent on the class proportions in the way that overall accuracy is (Pepe, 2003). Random label permutation testing was used to assess whether the performance achieved with our chosen classifier was significant (Hsing et al., 2003).

[0191] Cross-validation. FIG. 1 is a dot plot of the fully cross-validated misclassification results for a particular classifier (DLDA with 30 genes) over the 100 iterations for 2-, 5-, 7-, 10-, 15-, 20-, 40- and 82-fold cross-validation. Leave-one-out cross-validation is equivalent to 82-fold cross-validation when there are 82 samples. As the number of folds increases, the number of test samples decreases, e.g., with 2-fold CV, the inventors test on 41 samples, with 10-fold CV the inventors test on about 8 samples, and with 40-fold CV the inventors test on 2 samples. The decrease in the number of test samples has at least two consequences. First, it increases the discreteness of the results, e.g., with the 40-fold CV using 2 test samples, there are only three possible values for the misclassification error (0/2, 1/2, or 2/2). The second consequence is an increase in the variation of the results, the SD is 6% for 2-fold, 10% for 5-fold, 14% for 10-fold, 19% for 20-fold, and 30% for 40-fold. Based on these and similar results for other measures of performance, the inventors chose to focus attention on the 2-fold CV results.

[0192] Permutation Testing of the Best Classifier (K-NN, k=7, 20-gene). Permutation testing of classification accuracy (ACC) is a powerful method to assess whether or not the accuracy that is achieved in a given study was significant (Mukherjee et al., 2003). The method begins with Algorithm 1 followed by permutation of class labels (i.e. response outcome), repeating Algorithm 1 Q times and comparing the original accuracy with those obtained via permutation, ACCqPERM q=1, . . . , Q.

[0193] Typically, the comparison is achieved by calculating the percentage of cases for which ACC is greater than or equal to ACCPERM. This measure is taken to be an empirical estimate of the p-value. For large Q it can be shown that in many situations this method is unbiased and robust against alternatives that do not take into account the underlying unique structure of the data (Good, 1994).

[0194] Permutation testing of ACC using Algorithm 2 includes (1) Perform Algorithm 1 and summarize ACC; (2) Randomly permute the class labels; (3) Repeat Algorithm 1, recording ACC^{PERM} at each run; (4) Repeat steps 2-3 Q times; and (5) Summarize comparison of ACC with ACC^{PERM} obtained by permuting the labels.

[0195] Significance in this case is a measure of whether or not the ACC achieved was better than chance, e.g. the permutation test. In the case of two groups with balance, i.e. the number of replicates in both groups equal, the null hypothesis with the permutation testing is defined as Ho: ACCTRUE=50% versus the alternative that Ha: ACCTRUE>50%. Hence, ACC arbitrarily close to 50% may be rejected as significant with enough samples, i.e. power, although ACC this low is rarely practical in medical decision making.

[0196] Results

[0197] Assessment of pathologic response. The overall pCR rate in the 82 patients was 26%, which is consistent with our previous experience in a larger randomized study using similar preoperative therapy (Green et al., 2001). Of the 8 factors listed in Table 2, only Age, Nuclear Grade, and ER status are significantly related to pCR when assessed individually. Preliminary analysis indicated that the probability of pCR was a parabolic function of age and this was confirmed with a univariate logistic regression model fitting age as a quadratic polynomial (p=0.0056). Estimated probabilities of complete response from this model are 10% for age 30, 38% for age 45, and 16% for age 60. The probability of pCR was 51% for ER negative patients, but only 6% for ER positive patients (p<0.0001). The probability of pCR was 38% for patients with Nuclear Grade 3, but only 6% for patients with lower grades (p=0.0006). In a logistic regression model with Age, Age2, Race=white, Tstage, Nstage>1, Nuclear-Grade>2, ER status, and HER2 status as predictors, only ER status (p=0.0037) and Age (p=0.012) were significant. The R-squared value was 38% and the area under the ROC curve was 90%.

[0198] Feature Selection To select informative genes for outcome prediction, expression data was compared in the highly chemotherapy sensitive (pCR) and more resistant tumors (cases with any residual disease). A beta uniform mixture (BUM) analysis of the p values showed a non-uniform distribution and was used to estimate false discovery rates (FDR) (Pounds and Morris, 2003). Setting the FDR to 5% resulted in 395 genes, 1% in 56 genes and 0.5% in 31 genes.

[0199] Development of multi-gene predictor of pathologic complete response. The inventors evaluated 14 classifier methods (SVM, DLDA, KNN k=3, 5, 7, 9, 11, 13, 15, 17, 19, 21) including various numbers of informative genes (39 values spanning the range 1 to 22,283, approximately equally spaced on the log scale) for a total of 546 classifiers. FIG. 2 shows the AAC results (means over the 100 iterations) for 2-fold CV plotting against the number of top genes included. The SVM classifiers clearly do worse than the others in this data set. The performance of the DLDA and KNN classifiers improves with increasing numbers of genes leveling off at about 80 genes. For classifiers with fewer than 80 genes, DLDA does slightly better achieving the best performance in this range at about 30 genes. A DLDA classifier with 30 genes has AAC about 22% with approximate 95% confidence intervals from 10% to 36%. Since the AAC results for most of the other classifiers (save for most of the SVM classifiers) fall within this confidence interval, these classifiers have performance that is statistically equivalent to those from DLDA with 30 genes. This indicates that there are many possible classifiers with very similar top performance.

[0200] FIG. 3 is similar to FIG. 2 but showing MER instead of AAC. Here the results for all the classifiers are within a fairly tight envelop all falling within the 95% confidence interval for the results of DLDA with 30 genes (27%+/−12%). Two SVM classifiers actually have better performance than DLDA at 30 genes but by only about 5%, which is well within the margin of estimation error (SD=6%). FIG. 4 shows the results for AAC using 5-fold CV. The results are similar to the 2-fold CV, but with DLDA more clearly superior around 30 genes.

[0201] Intuitively, the inventors think a classifier with fewer genes than training samples makes sense to minimize overfitting and to yield a manageable number of genes. Also, the literature and inventor's experience suggest it can be problematic to rely on a small handful of genes. Somewhat arbitrarily, DLDA was selected using the 30 top genes as a single classifier to be tested on independent validation data. In addition to the MER and AAC results reported above, when using all 82 samples for training and testing, this classifier has 95% correct prediction among pCR patients, and 77% correct among RD patients. In addition, 59% of the patients predicted to be pCR were actually pCR, while 98% of the patients predicted to be RD actually were. After full 2-fold cross-validation, these values were: 65%, 75%, 47% and 87%, respectively.

[0202] To determine if this predictor performs significantly better than chance the inventors performed permutation testing in traditional 2-fold cross validation. The permutation test p-value was 0/1000, in other words none of the 1000 permuted data sets had accuracy as high or higher than that estimated from the original class labels. Permutation testing while allowing the genes to be resorted at each cross-validation iteration was deemed computationally prohibitive.

[0203] Prevalidation. A logistic regression model with the variables listed in Table 2 had an R-squared value of 38% and an area under the ROC curve of 90%. Adding the five top ranked genes to this model increased the R-squared value to 49%, the ROC area to 95% and yielded a likelihood ratio p-value for the new genes=0.0083. Since the inventors selected these genes as the most discriminatory from the array, this assessment is of course biased in favor of the genes.

[0204] To account for this, Tibshirani and Efron (2002) suggests using a pre-validation approach in which rather than including the expression value for the genes, the inventors include a cross-validated prediction from a multi-gene classifier (DLDA with 30 genes). The inventors used the proportion of pCR predictions from among the 100 repetitions of cross-validation as our value. Including this value in the model yielded a likelihood ratio p-value for the cross-validated predictions=0.0019 for standard cross-validation but p=0.75 for full cross-validation where the genes are resorted in each iteration.

[0205] The 30-gene DLDA itself yielded an ROC area of 92% when assessed on all 82 samples. This is comparable to the 90% ROC area for the logistic regression model based on the clinical variables. However, when the fully cross-validated values are used, the ROC area drops to 81%. There is no comparable value for the clinical data, since these variables are not being selected from a much larger set.

### Example 2

### Tau Expression as a Predictive Marker

[0206] Methods

[0207] Patients and specimens. This study was conducted at the Nellie B. Connally Breast Center of the University of Texas M. D. Anderson Cancer Center (MDACC). Sixty patients with newly diagnosed stage I-III breast cancer were included in the marker discovery study using gene expression profiling (LAB99-402). This prospective clinical study was approved by the institutional review board (IRB) and all patients signed an informed consent for voluntary participation. Fine-needle aspiration (FNA) was performed at the time of diagnosis before any treatment, and gene profiling was performed using Affymetrix U133A oligonucleotide probe arrays as previously reported (Symmans et al., 2003). All patients received 24 weeks of sequential T/FAC chemotherapy and underwent lumpectomy or modified radical mastectomy with axillary node sampling as determined appropriate by the surgeon. Complete pathologic response was defined as no histopathologic evidence of any residual invasive cancer cells in the breast and in the lymph nodes. The study population was described in detail previously (Ayers et al., 2004).

[0208] For immunohistochemical (IHC) validation a tissue microarray was used. The array was built from formaldehyde fixed, paraffin embedded tissues of pretreatment core needle biopsies from patients with stage I-III breast cancer. All patients received 24 weeks of preoperative chemotherapy with sequential paclitaxel and 5-fluorouracil, doxorubicin, cyclophosphamide on a clinical trial (MDACC DM 98-240) between December 1998 and April 2001 and subsequently underwent lumpectomy or modified radical mastectomy with axillary node sampling. One hundred and forty-three patients had pretreatment tissue available for tissue array analysis of Tau expression. Immunohistochemistry and data analysis were conducted in accordance with a laboratory protocol (LAB01-427) approved by the IRB of the University of Texas M. D. Anderson Cancer Center.

[0209] Twelve human breast tumor cell lines (T47D, BT20, ZR75.1, MCF7, MDA-MB-231, MDA-MB-361, MDA-MB 435, MDA-453, MDA-468, BT 549, BT 474 and SKBR3) were obtained from the American Type Culture Collection (ATCC, Manassas, Va.). All culture media components were purchased from the M. D. Anderson Tissue Culture Core Facility (Houston, Tex.).

[0210] Microarray data analysis. Microarray Suite 5.0 was used for data acquisition. dCHIP V1.3 (dchip.com) software was used for normalization across arrays. Probe set level intensity estimates were generated using the perfect match model (Stec et al., in press). To identify genes differentially expressed between cases with pathologic CR (n=18) and those with residual disease (n=42), probe sets were ordered by p-values obtained with two-sample t-tests with unequal variance on the ranks. A beta uniform mixture (BUM) analysis of the p values showed a non-uniform distribution and was used to estimate false discovery rates (Pounds and Morris, 2003). Setting the false discovery rate to 1% resulted in 19 probe sets, 4 out of the top 6 probe sets targeted the Tau gene.

[0211] Immunohistochemistry. Tissue microarrays were constructed with 0.6 mm diameter cores spaced 0.8 mm apart using a Tissue Microarray (Beecher Instruments, Inc). Two representative areas of each pre-chemotherapy core biopsy were selected for coring and placement in the tissue microarray. The tissue microarray blocks were cut to 5 μm sections. The tissue microarray slides were deparaffinized; and after blocking endogenous peroxidase activity and antigen retrieval (10 minutes high temperature microwave oven in citrate buffer, pH 6.0), the slides were incubated with anti-Tau antibody (1:50 dilution, clone T1029, US Biological) overnight at 4° C. Bound antibody was detected by using an antimouse horseradish peroxidase-labeled polymer secondary antibody (DAKO Envision TM+ System, DAKO, Carpentia, Calif.) then DAB substrate. Normal breast epithelium served as internal positive control and negative control included omission of the primary antibody. Cytoplasmic staining intensity was graded as either negative (0/1+) or positive (2+/3+). Slides were scored independently by 2 pathologists and without knowledge of the clinical outcome. Correlation with complete response was assessed in a univariate analysis (Chi square test) and a multivariate analysis including patient age, tumor size, histological type and grade, estrogen receptor, progesterone receptor and HER2 status and Tau staining intensity (logistic regression).

[0212] Small interfering RNA studies. Two siRNA oligonucleotides directed against microtubule associated protein Tau (genbank accession number NM_{—}016835.1) were ordered from Qiagen. Breast cancer cell lines were screened for Tau protein expression by Western blot analysis using a monoclonal anti-Tau antibody (#13-1400: clone T14, Zymed, CA). ZR75.1 cells were selected for siRNA studies and were transfected with a control siRNA (directed against lamin) or 2 distinct anti-Tau siRNA (5′-AATCACACCCAACGTGCAGAA-3′ (SEQ ID NO:194) and 5′-AACTGGCAGTTCTGGAGCAAA-3′) (SEQ ID NO:195) constructs. Five hundred nanograms of siRNA was transfected using 1.5 μl RNAiFect (Qiagen) onto 1-3×10⁴ cells in 96-well plates or 5 μg of siRNA was transfected using 15 μl RNAiFect (Qiagen) onto 1.5-4×10⁵ cells in 6-well plates following the manufactures instructions.

[0213] In vitro apoptosis and cell growth assays. Twenty-four hours after siRNA transfection, the medium was changed and cells were treated with various concentrations of paclitaxel and epirubicin. Proliferation rates were determined with CellTiter-Glo® Luminescent Cell Viability Assay, (Promega) after 48 hours of drug exposure according to the manufacturer's instructions. Chemosensitivity was determined from three separate experiments. Growth curves were generated with GraphPad Prism 4.01 (GraphPad Software, San Diego, Calif.). The effect of Tau expression on drug uptake was assayed using a fluorescent-conjugated paclitaxel (Oregon Green 488 paclitaxel, Molecular probes, Eugene, Oreg.) or spontaneously fluorescent epirubicin (Kimichi-Sarfaty et al., 2002; Harris et al., 2003). Forty-eight hours after siRNA transfection, 3×10⁵ cells were trypsinized and resuspended in 1 ml of regular medium containing 1 μM of fluorescent paclitaxel or 16 μM of epirubicin and incubated at 37° C. for 20 to 80 min. The pellet was resuspended in 400 μl of phosphate-buffered saline before FACS analysis (Kimichi-Sarfaty et al., 2002) using CellQuest software (BD Biosciences, San Jose, Calif.). Data were recorded by the FACScan as arbitrary units. The amount of fluorescence per cell (arbitrary fluorescence units) was taken as the measure of drug uptake. Results were displayed as histograms together with the mean fluorescence and standard deviation. The percentage of fluorescent cells versus non fluorescent cells was compared at least three times at 20, 50 and 80 minutes. Fluorescence paclitaxel uptake was also observed using an inverted fluorescent microscope.

[0214] Tubulin polymerization assays. Bovine brain tubulin (2 mg/ml) polymerization assays were performed in 100-μl volumes at 37° C. using the Tubulin Polymerization Assay Kit (Cytoskeleton, Inc., Denver, Colo.) and following the manufacturer recommendations. Purified Tau protein was purchased from Cytoskeleton (ref #TA01). Fluorescent Bodipy-paclitaxel was purchased from Molecular probes (Bodipy 564/570, Molecular probes, Eugene, Oreg.). OD340 was measured every 30 seconds for 30-60 min. The plots show the change in turbidity after correcting the data for the baseline absorbance.

[0215] Results

[0216] Low expression of Tau mRNA is associated with pathologic complete response to preoperative chemotherapy. To identify genes differentially expressed between cases with pathological CR (n=18) and those with residual cancer (n=42), all probe sets called present on the U133A chip were ordered by p-values obtained with two-sample t-tests with unequal variance on the ranks. The first (203930_s_at), third (203928_x_at), fourth (206401_x_at), and sixth probe sets (203929_s_at) on this list of differentially expressed genes all targeted the same gene, microtubule-associated protein Tau (NM_{—}16835.1). Tau mRNA expression was significantly lower (P<1.2×10⁻⁶) in tumors that achieved pathological CR. (FIG. 5). There was no differential expression of any of the other microtubule-associated proteins represented in our array data.

[0217] Validation of Tau expression with immunohistochemistry on tissue arrays in an independent patient population. Next, the inventors examined Tau protein expression in an independent set of cases using tissue microarrays of pre-chemotherapy core needle biopsies of breast cancer. The inventors performed immunohistochemistry (IHC) on 122 breast cancer tissues. All patients received 24 weeks of preoperative paclitaxel and anthracycline containing chemotherapy. None of these patients were included in the microarray study; therefore they represent an independent but identically treated validation group. Thirty-eight patients experienced pathological CR (31%). Cytoplasmic expression of Tau protein was seen in normal breast epithelium and blood vessels (FIG. 6A). Sixty-four tumors (52%) were considered Tau negative, including 14 with complete absence of Tau by immunohistochemistry (IHC score 0) and 50 tumors with less Tau expression than normal controls (IHC score 1+) (FIG. 6B). Fifty-eight tumors (48%) were positive for Tau protein expression, defined as IHC score 2+ that had uniform staining of similar or slightly greater intensity than normal contols (FIG. 6C) or IHC score 3+ that had uniform high intensity staining (FIG. 6D). This dichotomization of staining results was determined after inspection of the distribution of results and without knowledge of the clinical outcome data. There were more pathological CRs among the Tau-negative tumors ( 28/64, 44%) than among the Tau-positive tumors ( 10/58, 17%). Most tumors that achieved pathological CR were Tau-negative ( 28/38, 74%) (FIG. 6E). The odds ratio for pathological CR in Tau-negative tumors was 3.7 (95% confidence interval: 1.6-8.6, P=0.0013). A multiple logistic regression model with pathological CR as the outcome and age, tumor size, nodal status and histology, nuclear grade, estrogen receptor (ER), progesterone receptor (PR), and HER2 expression as covariates identified high nuclear grade (P<0.01), young age (P=0.03) and Tau-negative status (P=0.04) as independent predictive factors of pathological CR (FIG. 6F). A similar multiple logistic regression model with Tau as the outcome and including the same clinicopathological parameters as covariates identified low or intermediate nuclear grade (P=0.05), ER (P=0.06) and PR (P=0.005) as independent predictors of Tau status. ER-negative and high-grade tumors tended to be Tau-negative. The Tau-pCR odds ratio when adjusted for age, tumor size, nodal status and nuclear grade and ER, PR, and HER2 status was 2.7 (0.9, 7.9) with P=0.059. These results confirm the microarray data that low Tau expression is associated with higher probability of achieving pathological CR.

[0218] Down regulation of Tau expression in breast cancer cells increases sensitivity to paclitaxel in vitro. The inventors hypothesized that low Tau expression is not only a marker of response but contributes to increased sensitivity to paclitaxel chemotherapy due to its effect on microtubule assembly. The inventors assessed Tau protein expression in breast cancer cell lines with Western blot using an anti-Tau monoclonal antibody that recognizes Tau irrespectively of phosphorylation status. Four cell lines (ZR75.1, T47D, MCF7 and MDA-MB 435) expressed Tau, whereas eight other cell lines did not (FIG. 7A). ZR75.1 cells were selected for further in vitro studies because they express high levels of Tau protein and are known to be relatively resistant to paclitaxel (Dougherty et al., 2004). The invenotrs used siRNAs to reduce Tau protein expression and showed with the same antiboby used for the tissue array (clone T1029, US Biological, MA) that the nadir occurred 36 h after siRNA transfection (FIG. 7B). Twenty-four hours after siRNA transfection, cells were exposed to various concentrations of paclitaxel or epirubicin and cell viability was assessed after 48 h of drug exposure using an ATP cell viability assay. Decreased Tau expression by siRNA knock down significantly increased the sensitivity of ZR75.1 cells to paclitaxel compared to control cells transfected with lamin siRNA or no siRNA. (FIG. 7C). The IC₅₀ concentration of paclitaxel was reduced from >10 μM to 100 nM. Tau down-regulation did not result in increased sensitivity to epirubicin (FIG. 7D). These data demonstrate that Tau protein expression partially protects cells from the cytotoxic effects of paclitaxel. Induced suppression of Tau protein expression renders cells highly sensitive to this paclitaxel, but not epirubicin.

[0219] Tau protein reduces paclitaxel binding to tubulin and interferes with the paclitaxel induced stabilization in vitro. Tau is a microtubule-associated protein that promotes tubulin assembly and stabilizes polymerized tubulin. The inventor hypothesized that Tau may interfere with paclitaxel binding and pharmacological stabilization of tubulin. Intracellular paclitaxel is mostly bound to tubulin. To estimate paclitaxel binding to tubulin in the presence or absence of Tau protein, the uptake of fluorescent paclitaxel in Tau siRNA-treated (Tau knock down) cells and lamin siRNA-treated control cells were measured. Forty-four hours after siRNA transfection, cells were exposed to 1 μM Oregon green-paclitaxel for 20 to 80 min and then analyzed by FACS. The amount of fluorescent paclitaxel in the cells can be assessed by plotting fluorescence intensity in the X-axis and cell count on the Y-axis. Control ZR75.1 cells (lamin-siRNA) displayed a unimodal distribution (FIG. 8A) with low fluorescence intensity (mean: 4 units). In Tau-siRNA transfected ZR75.1 cells, the distribution of fluorescence intensity was bimodal with a fraction of highly fluorescent cells present (mean: 100 units) corresponding to the successfully transfected subpopulation of cells (FIG. 8B). When Tau expression was knocked down, the percentage of cells showing fluorescence over 10 units was 27.2% (+/−6.3) versus 7.2 (+/−0.8) in cells transfected with lamin siRNA (FIG. 8C). The same FACS experiment was conducted with epirubicin, which has spontaneous fluorescence. The distributions were unimodal and the fluorescence uptake was slightly decreased in the Tau knocked-down cells (FIGS. 8D and 16E). Using fluorescent microscopy, paclitaxel was visualized in the cytoplasm (FIG. 8F) and in the mitotic spindle (FIG. 8G) in Tau knocked-down cells. These data demonstrate that cells with lowered Tau protein expression accumulate more paclitaxel, but not epirubicin.

[0220] Microtubules are formed in vitro by non-covalent polymerization of tubulin dimers (Desai et al., 1997; Hong et al., 1998). Microtubule associated proteins, GTP and paclitaxel increase microtubule polymerization rates which can be measured by observing an increase in absorbance at 340 nm (Lu and Wood, 1993; Rao et al., 1999). The inventors hypothesized that Tau may reduce pharmacological tubulin polymerization induced by paclitaxel. The inventors performed a kinetic spectrophotometric tubulin polymerization assay in which Tau and paclitaxel were added together to the tubulin mixture. As shown in FIG. 9A, Tau and paclitaxel both induced tubulin polymerization and contrary to our expectation their combined effect was partially additive. Next, tubulin was pre-incubated with Tau before adding paclitaxel which approximates a more physiological sequence of drug exposure. Pre-incubation with Tau reduced the ability of paclitaxel to induce maximal tubulin polymerization in a dose-dependent manner (FIG. 9B). This phenomenon may have been due to reduced substrate availability because tubulin dimers already polymerized by Tau cannot be recruited by paclitaxel, or alternatively, Tau may directly compete with paclitaxel binding to tubulin.

[0221] To examine if paclitaxel binding to tubulin is affected by Tau expression, the inventors used fluorescent bodipy-paclitaxel. When fluorescent paclitaxel binds to microtubules it results in enhanced fluorescence. The inventors used this characteristic to assess the competition between Tau and paclitaxel in vitro. Fluorescent paclitaxel (5 μM) was added to a tubulin solution after 30 minutes pre-incubation with Tau (15 μM) or regular (non-fluorescent) paclitaxel (20 μM), or reaction buffer alone and fluorescence was measured 30 minutes later. Because of the insolubility of paclitaxel, the inventors were limited to 5 μM and had to make the samples with 25% bodipy-paclitaxel and 75% unlabelled paclitaxel to keep the DMSO concentration below 10%. As shown in FIG. 9C, the competition between fluorescent paclitaxel and unlabelled paclitaxel was very high and the fluorescence was low because fluorescent paclitaxel could not bind to the microtubules. In the control wells, the addition of fluorescent paclitaxel induced polymerization and after 30 minutes, fluorescence emission was high. When tubulin was pre-incubated with Tau there was less fluorescence, indicating that Tau partially inhibited paclitaxel binding to microtubules.

[0222] All of the compositions and methods disclosed and claimed herein can be made and executed without undue experimentation in light of the present disclosure. While the compositions and methods of this invention have been described in terms of preferred embodiments, it will be apparent to those of skill in the art that variations may be applied to the compositions and methods and in the steps or in the sequence of steps of the methods described herein without departing from the concept, spirit and scope of the invention. More specifically, it will be apparent that certain agents which are both chemically and physiologically related may be substituted for the agents described herein while the same or similar results would be achieved. All such similar substitutes and modifications apparent to those skilled in the art are deemed to be within the spirit, scope and concept of the invention as defined by the appended claims.

1. A method for assessing the responsiveness of a tumor to therapy comprising:
(a) obtaining a sample of a tumor from a cancer patient;
(b) evaluating the sample for expression of one or more markers identified in Table 1; and
(c) assessing the responsiveness of the tumor to therapy based on the evaluation of marker expression in the sample.

2. The method of claim 1 wherein the tumor is classified as sensitive, wherein the therapy achieves an outcome of a complete pathological response.

3. The method of claim 2, wherein the chance of a complete pathological response is at least 60%.

4. The method of claim 1, wherein the tumor is classified as unlikely to achieve complete pathological response to therapy.

5. The method of claim 4 wherein the chance of a complete pathological response is less than 15%.

6. The method of claim 1, wherein the therapy is P/FAC therapy.

7. The method of claim 1, wherein evaluating the expression of the one or more markers comprises using a prediction algorithm.

8. The method of claim 7, wherein the algorithm is k-nearest neighbor, support vector machines, diagonal linear discriminant analyses, or compound co-variate predictor.

9. The method of claim 8, wherein the algorithm is a k-nearest neighbor algorithm.

10. The method of claim 9, wherein the k-nearest neighbor algorithm is a k-nearest neighbor with a k=7.

11. The method of claim 1, wherein the tumor comprises breast cancer.

12. The method of claim 1, wherein the sample is obtained by aspiration, biopsy, or surgical resection.

13. The method of claim 1, wherein assessing the expression of the one or more markers comprises detecting mRNA of the one or more markers.

14. The method of claim 13, wherein the detection comprises microarray analysis.

15. The method of claim 14, wherein the microarray is further defined as an Affymetrix Gene Chip.

16. The method of claim 13, wherein the detection comprises PCR.

17. The method of claim 13, wherein the detection comprises in situ hybridization.

18. The method of claim 1, wherein assessing the expression of the one or more markers comprises detecting the protein encoded by one or more markers.

19. The method of claim 18, wherein detecting the protein is by immunohistochemistry.

20. The method of claim 1, wherein the marker is SEQ ID NO:1, microtubule-associated Tau.

21. The method of claim 20, wherein the therapy is P/FAC therapy.

22. The method of claim 20, wherein the tumor comprises breast cancer.

23. The method of claim 20, wherein the sample is obtained by aspiration, biopsy, or surgical resection.

24. The method of claim 20, wherein assessing the expression of SEQ ID NO:1 comprises detecting mRNA.

25. The method of claim 24, wherein the detection comprises PCR.

26. The method of claim 24, wherein the detection comprises in situ hybridization.

27. The method of claim 20, wherein assessing the expression of SEQ ID NO:1 comprises detecting a microtubule-associated Tau protein.

28. The method of claim 27, wherein detecting the protein is by immunohistochemistry.

29. A method of monitoring a cancer patient receiving P/FAC therapy comprising:
(a) obtaining a tumor sample from the patient during P/FAC therapy;
(b) evaluating expression of one or more markers of Table 1 in the tumor sample; and
(c) assessing the cancer patient's responsiveness to P/FAC therapy.

30. The method of claim 29, further comprising repeating steps (a) to (c) at various time points during P/FAC therapy.

31. The method of claim 29, wherein the marker is a microtubule-associated protein Tau marker.

32. A method of assessing anti-cancer activity of a candidate substance comprising:
(a) contacting a first cancer cell with the candidate substance;
(b) comparing expression of one or more markers in Table 1 in the first cancer cell with expression of the markers in a second cancer cell not contacted with the candidate substance; and
(c) assessing the anti-cancer activity of the candidate substance.

33. The method of claim 32, wherein the anti-cancer activity is sensitization of a cancer cell to therapy.

34. The method of claim 32, wherein the marker is a microtubule-associated protein Tau marker.

35. The method of claim 33, wherein the therapy is a chemotherapy.

36. The method of claim 35, wherein the chemotherapy is P/FAC therapy.

The application's sequence listing, which the Patent Office published only in electronic form, follows.

SEQUENCE LISTING (195 sequences)

SEQ ID NO: 1 - DNA, 3747 bp, Homo sapiens
cctcccctggggaggctcgcgttcccgctgctcgcgcctgccgcccgccggcctcaggaacgcgccctctcgccgcgcgcgccctcgcagtcaccgccacccaccagctccggcaccaacagcagcgccgctgccaccgcccaccttctgccgccgccaccacagccaccttctcctcctccgctgtcctctcccgtcctcgcctctgtcgactatcaggtgaactttgaaccaggatggctgagccccgccaggagttcgaagtgatggaagatcacgctgggacgtacgggttgggggacaggaaagatcaggggggctacaccatgcaccaagaccaagagggtgacacggacgctggcctgaaagaatctcccctgcagacccccactgaggacggatctgaggaaccgggctctgaaacctctgatgctaagagcactccaacagcggaagatgtgacagcacccttagtggatgagggagctcccggcaagcaggctgccgcgcagccccacacggagatcccagaaggaaccacagctgaagaagcaggcattggagacacccccagcctggaagacgaagctgctggtcacgtgacccaagagcctgaaagtggtaaggtggtccaggaaggcttcctccgagagccaggccccccaggtctgagccaccagctcatgtccggcatgcctggggctcccctcctgcctgagggccccagagaggccacacgccaaccttcggggacaggacctgaggacacagagggcggccgccacgcccctgagctgctcaagcaccagcttctaggagacctgcaccaggaggggccgccgctgaagggggcagggggcaaagagaggccggggagcaaggaggaggtggatgaagaccgcgacgtcgatgagtcctccccccaagactcccctccctccaaggcctccccagcccaagatgggcggcctccccagacagccgccagagaagccaccagcatcccaggcttcccagcggagggtgccatccccctccctgtggatttcctctccaaagtttccacagagatcccagcctcagagcccgacgggcccagtgtagggcgggccaaagggcaggatgcccccctggagttcacgtttcacgtggaaatcacacccaacgtgcagaaggagcaggcgcactcggaggagcatttgggaagggctgcatttccaggggcccctggagaggggccagaggcccggggcccctctttgggagaggacacaaaagaggctgaccttccagagccctctgaaaagcagcctgctgctgctccgcgggggaagcccgtcagccgggtccctcaactcaaagctcgcatggtcagtaaaagcaaagacgggactggaagcgatgacaaaaaagccaagacatccacacgttcctctgctaaaaccttgaaaaataggccttgccttagccccaaactccccactcctggtagctcagaccctctgatccaaccctccagccctgctgtgtgcccagagccaccttcctctcctaaacacgtctcttctgtcacttcccgaactggcagttctggagcaaaggagatgaaactcaagggggctgatggtaaaacgaagatcgccacaccgcggggagcagcccctccaggccagaagggccaggccaacgccaccaggattccagcaaaaaccccgcccgctccaaagacaccacccagctctggtgaacctccaaaatcaggggatcgcagcggctacagcagccccggctccccaggcactcccggcagccgctcccgcaccccgtcccttccaaccccacccacccgggagcccaagaaggtggcagtggtccgtactccacccaagtcgccgtcttccgccaagagccgcctgcagacagcccccgtgcccatgccagacctgaagaatgtcaagtccaagatcggctccactgagaacctgaagcaccagccgggaggcgggaaggtgcagataattaataagaagctggatcttagcaacgtccagtccaagtgtggctcaaaggataatatcaaacacgtcccgggaggcggcagtgtgcaaatagtctacaaaccagttgacctgagcaaggtgacctccaagtgtggctcattaggcaacatccatcataaaccaggaggtggccaggtggaagtaaaatctgagaagcttgacttcaaggacagagtccagtcgaagattgggtccctggacaatatcacccacgtccctggcggaggaaataaaaagattgaaacccacaagctgaccttccgcgagaacgccaaagccaagacagaccacggggcggagatcgtgtacaagtcgccagtggtgtctggggacacgtctccacggcatctcagcaatgtctcctccaccggcagcatcgacatggtagactcgccccagctcgccacgctagctgacgaggtgtctgcctccctggccaagcagggtttgtgatcaggcccctggggcggtcaataattgtggagaggagagaatgagagagtgtggaaaaaaaaagaataatgacccggcccccgccctctgcccccagctgctcctcgcagttcggttaattggttaatcacttaacctgcttttgtcactcggctttggctcgggacttcaaaatcagtgatgggagtaagagcaaatttcatctttccaaattgatgggtgggctagtaataaaatatttaaaaaaaaacattcaaaaacatggccacatccaacatttcctcaggcaattccttttgattcttttttcttccccctccatgtagaagagggagaaggagaggctctgaaagctgcttctgggggatttcaagggactgggggtgccaaccacctctggccctgttgtgggggttgtcacagaggcagtggcagcaacaaaggatttgaaaactttggtgtgttcgtggagccacaggcagacgatgtcaaccttgtgtgagtgtgacgggggttggggtggggcgggaggccacgggggaggccgaggcaggggctgggcagaggggaggaggaagcacaagaagtgggagtgggagaggaagccacgtgctggagagtagacatccccctccttgccgctgggagagccaaggcctatgccacctgcagcgtctgagcggccgcctgtccttggtggccgggggtgggggcctgctgtgggtcagtgtgccaccctctgcagggcagcctgtgggagaagggacagcgggttaaaaagagaaggcaagcctggcaggagggttggcacttcgatgatgacctccttagaaagactgaccttgatgtcttgagagcgctggcctcttcctccctccctgcagggtagggcgcctgagcctaggcggttccctctgctccacagaaaccctgttttattgagttctgaaggttggaactgctgccatgattttggccactttgcagacctgggactttagggctaaccagttctctttgtaaggacttgtgcctcttgggagacgtccacccgtttccaagcctgggccactggcatctctggagtgtgtgggggtctgggaggcaggtcccgagccccctgtccttcccacggccactgcagtcaccccgtctgcgccgctgtgctgttgtctgccgtgagagcccaatcactgcctatacccctcatcacacgtcacaatgtcccgaattc

SEQ ID NO: 2 - DNA, 539 bp, Homo sapiens
tttttttttttttttttttttaaatgtatactattaaagttggattattaatctaatatttgtgtttgccttggggactaataaacctcacaacctgaggatcacctcagttaaaccaaggctttgtcatcacagagctactcagcagaggtctgtctcagctgttccttgaactaaggaaggagtcagtcagctaggagagaaaagtccttttgaaagcagacagcatcatgtaccttgctgactcagctacatacataaggcctcaagccttgctgccagttcttaaaggaactgtgttctcttttcacttttcctggcttatggggcagtagagggtttccgacctcaaatgccaataccaggtaggtagaaggaccttaggctcaactgctggctcctcgtaataacacacactgtattctgtggtgggtgccactctgctctgcctgtgtcatgtcacctttcctaatccagcacatcctcgcccaagaaaaccctattttggggtcattcattctattcttatttctctctta

SEQ ID NO: 3 - DNA, 1108 bp, Homo sapiens
ccgcctctgtcgactatcaggtgaactttgaaccaggatggctgagccccgccaggagttcgaagtgatggaagatcacgctgggacgtacgggttgggggacaggaaagatcaggggggctacaccatgcaccaagaccaagagggtgacacggacgctggcctgaaagctgaagaagcaggcattggagacacccccagcctggaagacgaagctgctggtcacgtgacccaagctcgcatggtcagtaaaagcaaagacgggactggaagcgatgacaaaaaagccaagggggctgatggtaaaacgaagatcgccacaccgcggggagcagcccctccaggccagaagggccaggccaacgccaccaggattccagcaaaaaccccgcccgctccaaagacaccacccagctctggtgaacctccaaaatcaggggatcgcagcggctacagcagccccggctccccaggcactcccggcagccgctcccgcaccccgtcccttccaaccccacccacccgggagcccaagaaggtggcagtggtccgtactccacccaagtcgccgtcttccgccaagagccgcctgcagacagcccccgtgcccatgccagacctgaagaatgtcaagtccaagatcggctccactgagaacctgaagcaccagccgggaggcgggaaggtgcaaatagtctacaaaccagttgacctgagcaaggtgacctccaagtgtggctcattaggcaacatccatcataaaccaggaggtggccaggtggaagtaaaatctgagaagcttgacttcaaggacagagtccagtcgaagattgggtccctggacaatatcacccacgtccctggcggaggaaataaaaagattgaaacccacaagctgaccttccgcgagaacgccaaagccaagacagaccacggggcggagatcgtgtacaagtcgccagtggtgtctggggacacgtctccacggcatctcagcaatgtctcctccaccggcagcatcgacatggtagactcgccccagctcgccacgctagctgacgaggtgtctgcctccctggccaagcagggtttgtgatcaggcccctgg

SEQ ID NO: 4 - DNA, 4829 bp, Homo sapiens
accgatcaaggatcaccagcctccaccccctctactacacggcccctcaactctgtggagcccgccaccatgcagccaattcccgaagcccacagcctctatgttaccctgattctctccgattccgtgatgaatatctttaaagacagaaactttgacagctgttgcatctgtgcctgcaacatgaacatcaaaggggcggatgtcgggctttacatccccgattcttccaatgaggaccagtaccgctgtacctgtgggtttagtgcgattatgaaccgcaaacttggctacaattcaggactcttccttgaagatgagttggatatttttgggaagaattctgatattggtcaggctgcagagaggcgcttaatgatgtgtcagtccaccttccttcctcaggtggaaggaaccaaaaaaccccaggagccacccataagccttctcctcctcctccagaatcaacacacacaaccttttgcttcactgaatttcctggactacatttcctctaacaatcgccaaactcttccctgtgtaagctggagttatgaccgggtgcaagcagataataatgattactggacggaatgctttaatgcgttggagcaggggcggcagtatgtggataaccccactggtggaaaagtggacgaagctctggtgagaagtgccactgtgcactcttggcctcacagcaatgtgctggacatcagcatgctctcctcccaggatgtggttcgtatgctgttgtccctgcagccctttctccaagatgccatccaaaagaagcgcacgggcaggacctgggagaacatccagcatgtgcagggaccactcacttggcagcagttccataaaatggcaggacggggaacctacggttcggaagaatctcctgagccgttgcccatccccactctgctggtaggctatgacaaggatttcctcaccatctcgccattctccttgccgttttgggagaggctcttgttggacccatatgggggccaccgtgatgttgcctatattgtggtgtgtccagaaaatgaggccttgctcgaaggagccaaaactttcttcagggacttgagtgctgtatacgagatgtgtaggcttgggcagcacaagctcatctgcaaagtgctacgtgacgggatcatgcgcgtgggaaaaactgtggcacagaagctgacagatgagcttgtgagtgagtggtttaaccagccttggagcggcgaggagaatgacaatcattccagactcaaactttatgcgcaagtttgccgccatcacctagcaccttatttagccactctgcagcttgatagcagcctattgataccacctaaataccagaccccaccagcagcagcacagggacaagctacgccagggaatgctgggcccttagctccaaatggatcagcagctcccccagctggcagtgcatttaatcccacctcgaatagtagttctacaaatcctgcagcaagtaattctgcatctggttcctctgtgccaccggtctcatcgtctgcctctgctcctggtattagccagataagcactacctcttcttcaggattcagtggtagtgttggagggcagaaccccagcactgggggcatttctgcggatagaacgcaagggaacataggctgtggtggagacactgaccctgggcagagctcttctcagccctcacaggatggacaagagagtgttacagaaagggagagaataggaattcccacggagcctgactctgcagacagccatgcccaccctccagctgttgtcatttacatggtggacccgttcacgtatgctgcagaggaggactccacttctgggaacttttggctgttgagcatgatgcgctgctacacagaaatgctggataatttacctgagcatatgagaaattctttcattctccagattgtgccttgccagtacatgctgcagacaatgaaggatgagcaagttttctacattcaatacttgaagtccatggcattttcagtgtactgccagtgcaggcgaccactgcctacacagatccacattaaatccctcacgggatttgggcctgcagccagcattgagatgaccctcaagaaccctgagcggcccagcccaatccagctttactcccctccctttatattggccccaatcaaagacaagcagacagagctgggagagacgtttggtgaggcgagccagaaatacaatgtgctcttcgtgggctattgtctgtctcacgaccagcgctggcttttggcttcctgcactgacctccatggggaattattagagacctgcgttgtaaatattgctttaccaaacaggtcacggaggagtaaagtatctgcacgtaaaattggactacagaagttatgggagtggtgcatagggattgtccaaatgacatctctaccctggagagttgtaatcgggcgacttgggcgtcttggccatggggagcttaaagattggagtatcctccttggagaatgttcactacagacaatcagcaaaaagctcaaggatgtgtgccggatgtgtggaatctctgccgcagactctccttctatccttagtgcctgcctggttgccatggagccccaggggtcctttgtagtgatgccagatgctgtcacaatgggctctttttttggccgaagtactgcactgaacatgcagtcatctcagctcaacacccctcaagatgcttcttgtacacacatcttggtgttcccaacatcatcaaccatccaggtggctccagccaactaccccaatgaagatgggtttagccccaacaatgatgatatgtttgttgaccttccattcccagatgatatggacaatgatattggcatattaatgactgggaacctccattcctctcccaactcttccccagtaccctccccaggctctccttctggaattggtgtgggctctcacttccagcatagtcggagccagggtgagcgtcttctttctagagaagcaccagaggagctaaagcagcagcccctggcccttgggtattttgtatcaactgccaaagctgagaatcttccccagtggttttggtcatcgtgtccccaggctcaaaaccagtgccctctcttcttaaaggcttcgctgcatcaccacatttcagtagcacagacagacgaacttctgcctgccaggaattctcagcgggttccacaccctcttgactccaaaaccacgtcggatgttttaaggtttgttttggagcagtacaacgctctgtcctggctcacgtgcaatccggccacccaggaccgtacttcctgccttcccgcccactttgtggtgctcactcagttgtacaatgccatcatgaatatactttaattggaaaagcacttgttctctctggctcagttctttctccctgcaacctctgtccaaggaacctgctacactctgcaaataacccacatccttttcttcagaccactctccacagtcctgcactgtgattccttctcagcaggcacatgtcaattctgcagtgttcattaccagagtgactccttgacacttctctcatggacctggaaacttccataagtggtgactttcagccagtgcggtggtgtgtgtagccccaaccactggtccccaggaagtggtggtggttgatggcttttcagcgggaaacagaagagacagtgtccttttgcacaagagtctgtgttttcagcccctgtatacaattgagggcagtctagccctttggatgaaatcctcttagttactggtgtatggcctgtgggttacctgaactccataatctgggactttttaaaaataagaaccagctcaagtacatggtttcatactggggtttctgtctccctagtgttcccatccagattagcatgagtgctttggttgacttcaaacctgtgtgtcaatgcagaaggtctggagacagcttcattttgtttatttattttaatttgttttgtcatatggtttttgtgaccttatttttttaattcacaaggaccaggtacagtagctgaaacccaattcagatccaccataggattctttgactacatacctctgtcctagaagccggaaaaggagtaaaaacacattggggagatcatgcctaaaagtaatatattcaaaaccacccagcagtaggttttgttaacaacaaactggattttaaaagttctgccatgttaagtggccagcatttcatgaaggataacatttttatacagaaggcagtcaagctcaactcagagccatggaggcaagtaccttaattagttttatatagtcacaacggaaatatattttctagtgaattcttattggaagccaggtctctcctctcattagatcaaaagggacttatgtacatacaacaattgaaagtgtttgctcatgaaatcagttataaatatggtgaattttttctggaccataggaatattatttcaaagaaatattacaacttaaccattaaattagtacttgaagttgagcctttgtggtgggactttttaaaaaaatgcctttttaaagcattaatggctaattgaagtattttatgactcctcattcctggcccagagggttgtctttgaaaccctgtttctaacccttgtgttgtgtgtttctgtctgaggacagtgggtgtgtactggcctcccgggagccactgtgaccaggcctttgagctcttgtcatctgtggagagaatcatgcaaattttaaaagttcttccaagagacttccatgtcctggttattaac

SEQ ID NO: 5 - DNA, 1866 bp, Homo sapiens
cgttcctcggcgccgccggggccccagagggcagcggcagcaacagcagcagcagcagcagcgggagtggagatggcggcggcggcggctcaggggggcgggggcggggagccccgtagaaccgagggggtcggcccgggggtcccgggggaggtggagatggtgaaggggcagccgttcgacgtgggcccgcgctacacgcagttgcagtacatcggcgagggcgcgtacggcatggtcagctcggcctatgaccacgtgcgcaagactcgcgtggccatcaagaagatcagccccttcgaacatcagacctactgccagcgcacgctccgggagatccagatcctgctgcgcttccgccatgagaatgtcatcggcatccgagacattctgcgggcgtccaccctggaagccatgagagatgtctacattgtgcaggacctgatggagactgacctgtacaagttgctgaaaagccagcagctgagcaatgaccatatctgctacttcctctaccagatcctgcggggcctcaagtacatccactccgccaacgtgctccaccgagatctaaagccctccaacctgctcagcaacaccacctgcgaccttaagatttgtgatttcggcctggcccggattgccgatcctgagcatgaccacaccggcttcctgacggagtatgtggctacgcgctggtaccgggccccagagatcatgctgaactccaagggctataccaagtccatcgacatctggtctgtgggctgcattctggctgagatgctctctaaccggcccatcttccctggcaagcactacctggatcagctcaaccacattctgggcatcctgggctccccatcccaggaggacctgaattgtatcatcaacatgaaggcccgaaactacctacagtctctgccctccaagaccaaggtggcttgggccaagcttttccccaagtcagactccaaagcccttgacctgctggaccggatgttaacctttaaccccaataaacggatcacagtggaggaagcgctggctcacccctacctggagcagtactatgacccgacggatgagccagtggccgaggagcccttcaccttcgccatggagctggatgacctacctaaggagcggctgaaggagctcatcttccaggagacagcacgcttccagcccggagtgctggaggccccctagcccagacagacatctctgcaccctggggcctggacctgcctcctgcctgcccctctcccgccagactgttagaaaatggacactgtgcccagcccggaccttggcagcccaggccggggtggagcatgggcctggccacctctctcctttgctgaggcctccagcttcaggcaggccaaggccttctcctccccacccgccctccccacggggcctcgggagctcaggtggccccagttcaatctcccgctgctgctgctgctgcgcccttaccttccccagcgtcccagtctctggcagttctggaatggaagggttctggctgccccaacctgctgaagggcagaggtggagggtggggggcgctgagtagggactcagggccatgcctgcccccctcatctcattcaaaccccaccctagtttccctgaaggaacattccttagtctcaagggctagcatccctgaggagccaggccgggccgaatcccctccctgtcaaagctgtcacttcgcgtgccctcgctgcttctgtgtgtggtgagcagaagtggagctggggggcgtggagagcccggcgcccctgccacctccctgacccgtctaatatataaatatagagatgtgtctatggctgaaaaaaaaaaaaaaaa

SEQ ID NO: 6 - DNA, 3181 bp, Homo sapiens
ccagacaccccccaaaatagactacctgcttccaggtcctgggcctgctcactctccccagccctccaagagggcggggcctctgacacccccaaaacctcccagaaggagcgactccattaagttccagcacaggctggagactagctccgagtcagaagccactctggtgggcagctccccatccactagtcccccgagcgccctgccccctgacgtggaccccggggagcccatgcacgcatcaccccctcgcaaggccagggtccgcattgcttccagctactaccctgaaggagatggggactcctcccacctgccggccaagaaatcctgtgatgaggacctcacctcccagaaggtggatgagctggggcagaagcgtcgccggccaaaatctgctcccagttttcggccgaagcttgctccagtagtgattcctgctcagttcctggaggaacagaagtgtgtcccggccagtggagaactctccccggagctccaggagtgggcaccttactcgcctgggcattccagccggcacagcaaccccccgctataccctagcaggccgtctgtgggcactgttccccggagtttgacccccagcaccactgtgagctccatcctgcggaaccccatctacactgtgcgcagtcacagggtcggcccctgcagctctccacctgcggcccgagatgctggcccccagggtttgcatcccagtgtccagcaccagggacgcctgagcctggacctgagccacaggacctgcagcgactactccgagatgagagccacccatgggtccaactcactgccctccagcgcccgcctgggttcttcgagtaacttgcagttcaaggcggaacgcattaaaatcccatcaacaccaagatatccgcggagtgtcgtgggctccgagagaggttcagtgtcacattctgaatgcagcactcctccacagtcacccctgaacatcgacaccctgtcctcttgtagccagtcccagacctcagcctccacattgcccagaatcgctgtcaaccccgcgtccctcggggagcggagaaaggacaggccttatgtggaggagccacgccacgtgaaggtgcagaagggctcagagccgctgggcatctccatcgtgagtggagagaagggcggcatctacgtctccaaggtgaccgtggggagcatcgctcaccaggctggcctcgagtatggggatcagttactggagttcaacggcataaacctgcggagcgccacggagcagcaggcgcggctcatcatcgggcagcagtgtgataccatcaccatcctggcccagtacaacccccacgtgcaccagctcagcagccactcccggtccagctcacacctggaccctgccggtacccactccactctccagggcagtggcaccaccaccccggagcatccatctgtcatcgacccactgatggagcaggacgaggggcctagcacccccccagccaagcagagcagctccaggattgcgggagatgccaacaagaagaccctggagccacgcgttgtcttcatcaaaaagtcccagctggagcttggggtgcacttgtgtggtgggaacctgcatggggtgtttgtggccgaggtggaggatgacagtcctgccaagggtcctgacggcctcgtgccaggggacctcatcctggagcctggacgtgcggaacaagacagtggaggaagtctatgtggagatgctgaagcccagggatggcgtccgcctgaaggtgcagtaccgccctgaggagttcacgaaggccaagggcctgcctggtgacagcttctacatcagggccctgtacgaccggctggcagatgtggagcaagagttgagctttaagaaggacgacatcctctacgtggatgacaccttaccccagggcacgttcgggtcctggatggcttggcagctggacgagaatgcccagaagatccagcgcgggcagattcccagcaaatatgtgatggaccaagaattctccaggaggctcagcatgtctgaagtcaaagatgacaatagcgccacaaagacgctgtcagcggctgcacgccggtccttttttcggaggaaacacaagcacaaacgcagcgggtccaaggacgggaaagacctgctcgccttggatgccttttccagtgactccattccactctttgaagattcggtgagcctggcctatcagcgggtccagaaggtggactgcaccgctctgaggcctgtcctgattctggggcctttgctggacgtggtgaaggagatgctggtgaatgaggctcctggcaagttctgcagatgtccccttgaggtgatgaaggcctcccagcaggccattgagcggggtgtcaaagattgcctgtttgtcgactataagcggagaagcggccatttcgatgtgaccactgtggcgtcaataaaggagatcacagaaaagaaccgacactgcctcctggacattgctccgcacgctattgagcggctccaccacatgcacatctaccccattgtcatcttcatccactacaagagcgccaagcacatcaaggagcagagagaccccatctacctgagggacaaggtgactcagaggcattccaaagagcagtttgaggcggcgcagaagcttgagcaggagtacagcaggtacttcacaggtaggtgtgcgtgggcctggagtggggagcaggcagcagggaaggaagcagaggcttcctaaggctgttttcttagccgtggagaagcccgcactttctacatgctcccaagtgctgtcatgagcacgttcctgacaagtcaggtgttcagattgcagtccctggccaacgtcaggattcttacaggttgaatgttaagctcaccgatcttggcctcaggtcctgcctggcttgcctgctcattttcacacgtgcagtggtgggtctgtctcatagcacaggtgcagtttagtgcagccacagtgtccccaggcagggcggggactggagcagcccccagtgtgccagcagtgtgggcagcggaggctaggggcccatctgtccctagcaccctccagggcagtcccgttttgcagcgggatttggcaaacccccctccaaaaaaaaaaaaacaaaaaacaaaaaaaaaaaaaaaaaa

SEQ ID NO: 7 - DNA, 3252 bp, Homo sapiens
gcggcccaggcccgcaaccttccctggtcgtgcgccctatgtaaggccagccgcggcaggaccaaggcggcggtgtcagctcgcgagcctaccctccgcggacggtcttgggtcgcctgctgcctggcttgcctggtcggcggcgggtgccccgcgcgcacgcgcaaagcccgccgcgttccccgaccccaggccgcgctctgtgggcctctgagggcggcatgcgggactacgacgaggtgaccgccttcctgggcgagtgggggcccttccagcgcctcatcttcttcctgctcagcgccagcatcatccccaatggcttcaccggcctgtcctccgtgttcctgatagcgaccccggagcaccgctgccgggtgccggacgccgcgaacctgagcagcgcctggcgcaaccacactgtcccactgcggctgcgggacggccgcgaggtgccccacagctgccgccgctaccggctcgccaccatcgccaacttctcggcgcttgggctggagccggggcgcgacgtggacctggggcagctggagcaggagagctgtctggatggctgggagttcagtcaggacgtctacctgtccaccattgtgaccgagtggaacctggtgtgtgaggacgactggaaggccccactcacaatctccttgttcttcgtgggtgtgctgttgggctccttcatttcagggcagctgtcagacaggtttggccggaagaatgtgctgttcgtgaccatgggcatgcagacaggcttcagcttcctgcagatcttctcgaagaattttgagatgtttgtcgtgctgtttgtccttgtaggcatgggccagatctccaactatgtggcagcatttgtcctggggacagaaattcttggcaagtcagttcgtataatattctctacgttaggagtgtgcatattttatgcatttggctacatggtgctgccactgtttgcttacttcatccgagactggcggatgctgctggtggcgctgacgatgccgggggtgctatgcgtggcactctggtggttcatccctgagtccccccgatggctcatctctcagggacgatttgaagaggcagaggtgatcatccgcaaggctgccaaagccaatgggattgttgtgccttccactatctttgacccgagtgagttacaagacctaagttccaagaagcagcagtcccacaacattctggatctgcttcgaacctggaatatccggatggtcaccatcatgtccataatgctgtggatgaccatatcagtgggctattttgggctttcgcttgatactcctaacttgcatggggacatctttgtgaactgcttcctttcagcgatggttgaagtcccagcatatgtgttggcctggctgctgctgcaatatttgccccggcgctattccatggccactgccctcttcctgggtggcagtgtccttctcttcatgcagctggtacccccagacttgtattatttggctacagtcctggtgatggtgggcaagtttggagtcacggctgccttttccatggtctacgtgtacacagccgagctgtatcccacagtggtgagaaacatgggtgtgggagtcagctccacagcatcccgcctgggcagcatcctgtctccctacttcgtttaccttggtgcctacgaccgcttcctgccctacattctcatgggaagtctgaccatcctgacagccatcctcaccttgtttctcccagagagcttcggtaccccactcccagacaccattgaccagatgctaagagtcaaaggaatgaaacacagaaaaactccaagtcacacaaggatgttaaaagatggtcaagaaaggcccacaatccttaaaagcacagccttctaacatcgcttccagtaagggagaaactgaagaggaaagactgtcttgccagaaatggccagcttgtgcagactccgagtccttcagtgacaaaggcctttgctgtttgtcctcttgacctgtgtctgacttgctcctggatgggcacccacactcagaggctacatatggccctagagcaccaccttcctctagggacactggggctacctacagacaacttcatctaagtcctaactattacaatgatggactcagcacctccaaagcagttaatttttcactagaaccagtgagatctggaggaatgtgagaagcatatgctaaatgtacattttaattttagactacttgaaaaggcccctaataaggctagaggtctaagtcccccacccctttccccactcccctctagtggtgaactttagaggaaaaggaagtaattgcacaaggagtttgattcttaccttttctcagttacagaggacattaactggatcattgcttccccagggcaggagagcgcagagctagggaaagtgaaaggtaatgaagatggagcagaatgagcagatgcagatcaccagcaaagtgcactgatgtgtgagctcttaagaccactcagcatgacgactgagtagacttgtttacatctgatcaaagcactgggcttgtccaggctcataataaatgctccattgaatctactattcttgttttccactgctgtggaaacctccttgctactatagcgtcttatgtatggtttaaaggaaatttatcaggtgagagagatgagcaacgttgtcttttctctcaaagctgtaatgtgggttttgttttattgtttatttgtttgttgttgtatccttttctccttgttatttgcccttcagaatgcacttgggaaaggctggttccttagcctcctggtttgtgtctttttttttttttttttaaacacagaatcactctggcaattgtctgcagctgccactggtgcaaggccttaccagccctagcctctagcacttctctaagtgccaaaaacagtgtcattgtgtgtgttcctttcttgatacttagtcatgggaggatattacaaaaaagaaatttaaattgtgttcatagtctttcagagtagctcactttagtcctgtaactttattgggtgatattttgtgttcagtgtaattgtcttctctttgctgattatgttaccatggtactcctaaagcatatgcctcacctggttaaaaaagaacaaacatgtttttgtgaaagctactgaagtgccttgggaaatgagaaagttttaataagtaaaatgattttttaaatatcaaaaaaaaaaaaaaaa

SEQ ID NO: 8 - DNA, 2051 bp, Homo sapiens
acatgacgaagcaacatgaattagggggcctcttggccttggtccaaaattgtcaatcagagatgaacataaaggactccagagcagtgggactgtctgtcaaaagactctgtatatcttttgtggatgagttttgtgagagaacagagagaccattgtacctggcacaagggctcttcatgaaaagggagacttactgggaggtgcaagacagtggcatttctcctctcctcttgctgctcagcacagccctggattgcagccccgaggctgagaccagacaaagcccgggaggcagaaagatgctccaagaaccaacactatcaatgtctttgcaaatcctcacaggattcctgtgggtccagctttggaactgggaaacctttcttcggatccgcactcattccactgatgccagctgcccctgaaggatgccagtactgtggtgtgtgagtctcagcagccgcccacacgctcctaactctgctgcatggcagatgcctaggtggaaatagcaaaaacaaggcccaggctggggccagggccagaggggaaggccctggattctcactcatgtgagatcttgaatctctttctttgttctgtttgtttagttagtatcatctggtaaaatagttaaaaaacaacaaaaaactctgtatctgtttctagcatgtgctgcattgactctattaatcacatttcaaattcaccctacattcctctcctcttcactagcctctctgaaggtgtcctggccagccctggagaagcactggtgtctgcagcacccctcagttcctgtgcctcagcccacaggccactgtgataatggtctgtttagcacttctgtatttattgtaagaatgattataatgaagatacacactataactacaagaaattataaatgtttttcacatcaggctgttctttttttttttttggaggcgaggttaaagcattactatttgcaaagcactctgtagctccctgttatggggataggtaactaatcagaataataatgtcactcgcatccacttcttagaacctggctccaaaggaaaataagctgatagactcaatcactttcctgaggatggaggcctatggcatgtgtggctgcaggtcgcgaagctgcttaatggtgctgggaagcctagaggaattaaataaagaccctggaggaggtgggatcggagctgcaccttgaacaaatagctcagatttgaacagatggatggaaaagagggaggtgttcccaaccaaggggacatgatacagggaacaggtcctatgtctctttactcctgagagtattaaacctagtaggtgggcagcccctcttggttgcctgttaccttattttgaattctttttgcaaaacatactatcacccgtccaaataatcttttgtctaaatccagacttcacattctgactggggcaaaaagaggcagtccagtaaaggttataaaataggtaccatcattgtttgccttatttagaaaagcttccaattttcactataatcaccctaagcctgagagaggtgaactgttcaagggtactttggctccagtgggtgacagtacctggcccagctttggaattgaaacatttctgatggtctgtactctgctagaacacaggatgcttctgctctccctgctctggcatcctgccaggtgtcatggccacgcacaggcatgaagacagccgggaagccagagttcccacgaagcactcactccttggacttgctcccaccccactggggagagcactcctggagcaggaaatgagcatctctcatctccctgaattccacatccactggctgaatgatcagggaggcatagcagtgagagccataggtcggcagagggaactcaggccctcctttaggatggccatcacctcatctcaatccagccaaatcaaccatctagagcacacaggccgagagaaatgtaataaaatataacatgagacacgtatgaaatttaaactttccggtagccacactagaaaaaaaaaaaaaaaaa

SEQ ID NO: 9 - DNA, 2542 bp, Homo sapiens
ggccagaagaaatctggcctcggaacacgccattctccgcgccgcttccaataaccactaacatccctaacgagcatccgagccgagggctctgctcggaaatcgtcctggcccaactcggcccttcgagctctcgaagattaccgcatctattttttttttcttttttttcttttcctagcgcagataaagtgagcccggaaagggaaggagggggcggggacaccattgccctgaaagaataaataagtaaataaacaaactggctcctcgccgcagctggacgcggtcggttgagtccaggttgggtcggacctgaacccctaaaagcggaaccgcctcccgccctcgccatcccggagctgagtcgccggcggcggtggctgctgccagacccggagtttcctctttcactggatggagctgaactttgggcggccagagcagcacagctgtccggggatcgctgcatgctgagctccctcggcaagacccagcggcggctcgggatttttttgggggggcggggaccagccccgcgccggcaccatgttcctggcgaccctgtacttcgcgctgccgctcttggacttgctcctgtcggccgaagtgagcggcggagaccgcctggattgcgtgaaagccagtgatcagtgcctgaaggagcagagctgcagcaccaagtaccgcacgctaaggcagtgcgtggcgggcaaggagaccaacttcagcctggcatccggcctggaggccaaggatgagtgccgcagcgccatggaggccctgaagcagaagtcgctctacaactgccgctgcaagcggggtatgaagaaggagaagaactgcctgcgcatttactggagcatgtaccagagcctgcagggaaatgatctgctggaggattccccatatgaaccagttaacagcagattgtcagatatattccgggtggtcccattcatatcagatgtttttcagcaagtggagcacattcccaaagggaacaactgcctggatgcagcgaaggcctgcaacctcgacgacatttgcaagaagtacaggtcggcgtacatcaccccgtgcaccaccagcgtgtccaatgatgtctgcaaccgccgcaagtgccacaaggccctccggcagttctttgacaaggtcccggccaagcacagctacggaatgctcttctgctcctgccgggacatcgcctgcacagagcggaggcgacagaccatcgtgcctgtgtgctcctatgaagagagggagaagcccaactgtttgaatttgcaggactcctgcaagacgaattacatctgcagatctcgccttgcggatttttttaccaactgccagccagagtcaaggtctgtcagcagctgtctaaaggaaaactacgctgactgcctcctcgcctactcggggcttattggcacagtcatgacccccaactacatagactccagtagcctcagtgtggccccatggtgtgactgcagcaacagtgggaacgacctagaagagtgcttgaaatttttgaatttcttcaaggacaatacatgtcttaaaaatgcaattcaagcctttggcaatggctccgatgtgaccgtgtggcagccagccttcccagtacagaccaccactgccactaccaccactgccctccgggttaagaacaagcccctggggccagcagggtctgagaatgaaattcccactcatgttttgccaccgtgtgcaaatttacaggcacagaagctgaaatccaatgtgtcgggcaatacacacctctgtatttccaatggtaattatgaaaaagaaggtctcggtgcttccagccacataaccacaaaatcaatggctgctcctccaagctgtggtctgagcccactgctggtcctggtggtaaccgctctgtccaccctattatctttaacagaaacatcatagctgcattaaaaaaatacaatatggacatgtaaaaagacaaaaaccaagttatctgtttcctgttctcttgtatagctgaaattccagtttaggagctcagttgagaaacagttccattcaactggaacattttttttttttccttttaagaaagcttcttgtgatccttcggggcttctgtgaaaaacctgatgcagtgctccatccaaactcagaaggctttgggatatgctgtattttaaagggacagtttgtaacttgggctgtaaagcaaactggggctgtgttttcgatgatgatgatgatcatgatgatgatgattttaacagttttacttctggcctttcctagctagagaaggagttaatatttctaaggtaactcccatatctcctttaatgacattgatttctaatgatataaatttcagcctacattgatgccaagcttttttgccacaaagaagattcttaccaagagtgggctttgtggaaacagctggtactgatgttcacctttatatatgtactagcattttccacgctgatgtttatgtactgtaaacagttctgcactcttgtacaaaagaaaaaac

SEQ ID NO: 10 - DNA, 2070 bp, Homo sapiens
agtagcgaccatttccattggcgttagggagtccttggagcgctgtgctgggaccgtggtggtgactggatccaggaggtcgagagtcgttcttctctttgcacagacgtgactctgcagctctttaacggcacccgctgctctcaacccagcttaccccacgtggtcccatggcggcggccgcgctaaggttccccgttcagggcacagtgacttttgaagacgtggctgtgaaatttacccaggaggaatggaatctccttagtgaggctcagagatgcctgtaccgtgatgtgacgctggagaacctggcacttatgtcctccctgggttgttggtgtggagtggaagatgaggcggcaccttctaagcagagtatttatatacaaagagagactcaggtcaggactcctatggcaggtgtgtctcccaagaaggcccacccctgtgagatgtgtggcccgatcttgggagacattttgcatgtggcagatcatcagggaacacatcacaagcagaaactgcacaggtgtgaggcctgggggaataaattgtatgacagtggaaactttcatcagcaccagaatgagcacattggagagaaaccctacagagggagtgttgaggaggcgttgtttgcgaagaggtgtaagttgcatgtgtcaggggagtcatctgtcttcagtgagagtgggaaagactttttgctcaggtcaggattactccagcaagaggccactcacactgggaagtcaaacagcaaaactgagtgtgtgtctctgtttcatgggggaaaaagccattacagctgtggaggatgcatgaaacattttagcaccaaagatatactcagtcagcacgagagactgctccctacagaagaaccttctgtgtggtgtgaatgtgggaaatcctctagcaaatatgacagcttcagtaatcatcaaggagttcacactagagaaaaaccttatacgtgtgggatatgtgggaaattatttaacagtaagtcccacctccttgtacaccagagaattcacactggagagaagccatatgagtgtgaggtttgtcagaaattttttaggcacaagtaccacctcattgcacaccagagagttcacactggggaaaggccatatgaatgcagtgattgtgggaagtcatttacccacagctctacattccgtgttcataagagagttcacactggtcagaagccttatgagtgcagtgaatgtgggaaatcttttgccgaaagctccagtctcactaaacacaggagagttcacactggagaaaagccttacgggtgcagtgaatgtgaaaaaaaatttaggcaaatctcttcacttcgtcatcatcagagagttcacaaaagaaagggcttatgagtgcagtgagtccagtctcattaaatattggagaatacacacctgagtaagatcctgtgattgcagcaaatgtggaaaatgtttacccaaaggtctgctctccttggatattggagagttcacactagagaagagtccttacaagtaaaataaatttgggcagttttgtagccacacctctgtattccttcaggattatagttaacactgaatgaaggccttactagtgtgacaaatacaggatatttatccagaagtctcactgcaagccctgcctcctgggttcatgccattctcctgcctcagcctccctagtagctgggactgcaggcaaccaccaccactcctaccttttttgtatttttggtagagatggggtttcaccctgttagccaggaagttctcaatctcctgacctcgtgatctgcccgccttggcctctcaaagtgttgggattgcaggcgtgagccactgctcctggcttgaattttcttataatcccatgaaaccatcatcagagtcacaataatgaatttatctaatctatcacctttgtattcacctggagcctttataaagtttttctctatgcagacaaccattgatttactctgctgtataatactttccattttctagaattttctgactgatgtaataaagtgtttcctcttat

SEQ ID NO: 11 - DNA, 5595 bp, Homo sapiens
gtcgccagcaaccgagcggggcccggcccgagcggggcctgggggtgcgacgccgagggcgggggagagcgcgccgctgctcccggaccgggccgcgcacgccgcctcaggaaccatcactgttgctggaggcacctgacaaatcctagcgaatttttggagcatctccacccaggaacctcgccatccagaagtgtgcttcccgcacagctgcagccatggggtctgaggaccacggcgcccagaaccccagctgtaaaatcatgacgtttcgcccaaccatggaagaatttaaagacttcaacaaatacgtggcctacatagagtcgcagggagcccaccgggcgggcctggccaagatcatccccccgaaggagtggaagccgcggcagacgtatgatgacatcgacgacgtggtgatcccggcgcccatccagcaggtggtgacgggccagtcgggcctcttcacgcagtacaatatccagaagaaggccatgacagtgggcgagtaccgccgcctggccaacagcgagaagtactgtaccccgcggcaccaggactttgacgaccttgaacgcaaatactggaagaacctcacctttgtctccccgatctacggggctgacatcagcggctctttgtatgatgacgacgtggcccagtggaacatcgggagcctccggaccatcctggacatggtggagcgcgagtgcggcaccatcatcgagggcgtgaacacgccctacctgtacttcggcatgtggaagaccaccttcgcctggcacaccgaggacatggacctgtacagcatcaactacctgcactttggggagcctaagtcctggtacgccatcccaccagagcacggcaagcgcctggagcggctggccatcggcttcttccccgggagctcgcagggctgcgacgccttcctgcggcataagatgaccctcatctcgcccatcatcctgaagaagtacgggatccccttcagccggatcacgcaggaggccggggaattcatgatcacatttccctacggctaccacgccggcttcaatcacgggttcaactgcgcagaatctaccaacttcgccaccctgcggtggattgactacggcaaagtggccactcagtgcacgtgccggaaggacatggtcaagatctccatggacgtgttcgtgcgcatcctgcagcccgagcgctacgagctgtggaagcagggcaaggacctcacggtgctggaccacacgcggcccacggcgctcaccagccccgagctgagctcctggagtgcgtcccgggcctcgctgaaggccaagctcctccgcaggtctcaccggaaacggagccagcccaagaagccgaagcccgaagaccccaagttccctggggagggtacggctggggcagcgctcctagaggaggctgggggcagcgtgaaggaggaggctgggccggaggttgaccccgaggaggaggaggaggagccgcagccactgccacacggccgggaggccgagggcgcagaagaggacgggaggggcaagctgcggccaaccaaggccaagagcgagcggaagaagaagagcttcggcctgctgcccccacagctgccgcccccgcctgctcacttcccctcagaggaggcgctgtggctgccatccccactggagcccccggtgctgggcccaggccctgcagccatggaggagagccccctgccggcaccccttaatgtcgtgccccctgaggtgcccagtgaggagctagaggccaagcctcggcccatcatccccatgctgtacgtggtgccgcggccgggcaaggcagccttcaaccaggagcacgtgtcctgccagcaggcctttgagcactttgcccagaagggtccgacctggaaggaaccagtttcccccatggagctgacggggccagaggacggtgcagccagcagtggggcaggtcgcatggagaccaaagcccgggccggagaggggcaggcaccgtccacattttccaaattgaagatggagatcaagaagagccggcgccatcccctgggccggccgcccacccggtccccactgtcggtggtgaagcaggaggcctcaagtgacgaggaggcatcccctttctccggggaggaagatgtgagtgacccggacgccttgaggccgctgctgtctctgcagtggaagaacagggcggccagcttccaggccgagaggaagttcaacgcagcggctgcgcgcacggagccctactgcgccatctgcacgctcttctacccctactgccaggccctacagactgagaaggaggcacccatagcctccctcggagagggctgcccggccacattaccctccaaaagccgtcagaagacccgaccgctcatccctgagatgtgcttcacctctggcggtgagaacacggagccgctgcctgccaactcctacatcggcgacgacgggaccagccccctgatcgcctgcggcaagtgctgcctgcaggtccatgccagttgctatggcatccgtcccgagctggtcaatgaaggctggacgtgttcccggtgcgcggcccacgcctggactgcggagtgctgcctgtgcaacctgcgaggaggtgcgctgcagatgaccaccgataggaggtggatccacgtgatctgtgccatcgcagtccccgaggcgcgcttcctgaacgtgattgagcgccaccctgtggacatcagcgccatccccgagcagcggtggaagctgaaatgcgtgtactgccggaagcggatgaagaaggtgtcaggtgcctgtatccagtgctcctacgagcactgctccacgtccttccacgtgacctgcgcccacgccgcaggcgtgctcatggagccggacgactggccctatgtggtctccatcacctgcctcaagcacaagtcggggggtcacgctgtccaactcctgagggccgtgtccctaggccaggtggtcatcaccaagaaccgcaacgggctgtactaccgctgtcgcgtcatcggtgccgcctcgcagacctgctacgaagtgaacttcgacgatggctcctacagcgacaacctgtaccctgagagcatcacgagtagggactgtgtccagctgggacccccttccgagggggagctggtggagctccggtggactgacggcaacctctacaaggccaagttcatctcctccgtcaccagccacatctaccaggtggagtttgaggacgggtcccagctgacggtgaagcgtggggacatcttcaccctggaggaggagctgcccaagagggtccgctctcggctgtcactgagcacgggggcaccgcaggagcccgccttctcgggggaggaggccaaggccgccaagcgcccgcgtgtgggcaccccgcttgccacggaggactccgggcggagccaggactacgtggccttcgtggagagcctcctgcaggtgcagggccggcccggagcccccttctaggacagctggccgctcaggcgaccctcagcccggcggggaggccatggcatgccccgggcgttcgcttgctgtgaattcctgtcctcgtgtccccgacccccgagaggccacctccaagccgcgggtgccccctagggcgacaggagccagcgggacgccgcacgcggccccagactcagggagcagggccaggcgggctcgggggccggccaggggagcaccccactcaactactcagaattttaaaccatgtaagctctcttcttctcgaaaaggtgctactgcaatgccctactgagcaacctttgagattgtcacttctgtacataaaccacctttgtgaggctctttctataaatacatattgtttaaaaaaaagcaagaaaaaaaggaaaacaaaggaaaatatccccaaagttgttttctagatttgtggctttaagaaaaaacaaaacaaaacaaacacattgtttttctcagaaccaggattctctgagaggtcagagcatctcgctgtttttttgttgttgttttaaaatattatgatttggctacagaccaggcagggaaagagacccggtaattggagggtgagcctcggggggggggcaggacgccccggtttcggcacagcccggtcactcacggcctcgctctcgcctcaccccggctcctgggctttgatggtctggtgccagtgcctgtgcccactctgtgcctgctgggaggaggcccaggctctctggtggccgcccctgtgcacctggccaggggaagcccgggggtctggggcctccctccgtctgcgcccacctttgcagaataaactctctcctggggtttgtctatctttgtttctctcacccgagagaaacgcaggtgttccagaggcttccttgcagacaaagcacccctgcacctcccatggctcaggatgagggaggcccccaggcccttctggttggtagtgagtgtggacagcttcccagctcttcgggtacaaccctgagcaggtcgggggacacagggccgaggcaggccttcggggcccctttcgcctgcttccgggcagggacgaggcctggtgtcctcgctccacccacccacgctgctgtcacctgaggggaatctgcttcttaggagtgggttgagctgatagagaaaaaacggccttcagcccaggctgggaagcgccttctccaggtgcctctccctcaccagctctgcacccctctggggagccttccccaccttagctgtctcctgccccagggagggatggaggagataatttgcttatattaaaaacaaaaaatggctgaggcaggagtttgggaccagcctgggctatatagcaagaccccatcactacaaattttttacaaattagctaggtgtggtggtgcgcacctgtggtcccagctactcgggaggctgtggtgggaggattgcttgagtccaggaggttgaggctgcagtcagctcagattgcaccactgcactccagcctgggcaacagagcgagaccctgtctccaaaaaaaaaaaaaaagcaatgtttatattataaaagagtgtcctaacagtccccgggctagagaggactaaggaaaacagagagagtgttacgcaggagcaagcctttcatttccttggtgggggaggggggcggttgccctggagagggccggggtcggggaggttggggggtgtcagccaaaacgtggaggtgtccctctgcacgcagccctcgcccggcgtggcgctgacactgtattcttatgttgtttgaaaatgctatttatattgtaaagaagcgggcgggtgcccctgctgcccttgtcccttgggggtcacacccatcccctggtgggctcctgggcggcctgcgcagatgggccacagaagggcaggccggagctgcacactctccccacgaaggtatctctgtgtcttactctgtgcaaagacgcggcaaaacccagtgccctggtttttccccacccgagatgaaggatacgctgtattttttgcctaatgtccctgcctctaggttcataatgaattaaaggttcatgaacgctgcg

SEQ ID NO: 12 - DNA, 2144 bp, Homo sapiens
gctgaagacagagcgatggtagttctggaggcctcgctccggggccgacccgaggccacagtgcctccgcggtagaccggacttgggtgacgggctccgggctcccgaggtgaagagcatcgggggctgagggatggaagggtctaagacgtccaacaacagcaccatgcaggtgagcttcgtgtgccagcgctgcagccagcccctgaaactggacacgagtttcaagatcctggaccgtgtcaccatccaggaactcacagctccattacttaccacagcccaggcgaaaccaggagagacccaggaggaagagactaactcaggagaggagccatttattgaaactcctcgccaggatggtgtctctcgcagattcatccccccagccaggatgatgtccacagaaagtgccaacagcttcactctgattggggaggcatctgatggcggcaccatggagaacctcagccgaagactgaaggtcactggggacctttttgacatcatgtcgggccagacagatgtggatcacccactctgtgaggaatgcacagatactcttttagaccagctggacactcagctcaacgtcactgaaaatgagtgtcagaactacaaacgctgtttggagatcttagagcaaatgaatgaggatgacagtgaacagttacagatggagctaaaggagctggcactagaggaggagaggctgatccaggagctggaagacgtggaaaagaaccgcaagatagtggcagaaaatctcgagaaggtccaggctgaggctgagagactggatcaggaggaagctcagtatcagagagaatacagtgaatttaaacgacagcagctggagctggatgatgagctgaagagtgttgaaaaccagatgcgttatgcccagacgcagctggataagctgaagaaaaccaacgtctttaatgcaaccttccacatctggcacagtggacagtttggcacaatcaataacttcaggctgggtcgcctgcccagtgttcccgtggaatggaatgagattaatgctgcttggggccagactgtgttgctgctccatgctctggccaataagatgggtctgaaatttcagagataccgacttgttccttacggaaaccattcatatctggagtctctgacagacaaatctaaggagctgccgttatactgttctggggggttgcggtttttctgggacaacaagtttgaccatgcaatggtggctttcctggactgtgtgcagcagttcaaagaagaggttgagaaaggcgagacacgtttttgtcttccctacaggatggatgtggagaaaggcaagattgaagacacaggaggcagtggcggctcctattccatcaaaacccagtttaactctgaggagcagtggacaaaagctctcaagttcatgctgacgaatcttaagtggggtcttgcttgggtgtcctcacaattttataacaaatgacttttttccttagggggaggtttgccttaaaggcttttaattttgttttgtttgcaaacatgttttaaattaaattcgggtaatattaaacagtacatgtttacaataccaaaaaagaaaaaatccacaaaagccactttattttaaaatatcatgtgacagatactttccagagctacaacatgccatctatagttgccagccctggtcagttttgattcttaaccccatggactcctttccctttcttctctgaaaaaaactaatttaaatttgcttttcttttttttaactgagttgaattgagattgatgtgttttcactggatttttatctctctcaacttcctgcacttaacaatatgaaatagaaacttttgtctttactgagatgaggatatgtttgagatgcacagttggataatgtgggaaaatgacatctaagctttacctggtcaccatgtgatgtgatcagatgcttgaaatttaacacttttcacttggttcttatactgaatgccgactctgctctgtgttagagatatgaaatggtgtttgatactgtttgagacattatggagagatttaattatttgtaataaaagatttgctgcagtctgaaaactgaaaaaaaaaaaaaaaaaaaaaaaaaaaaaaaa

SEQ ID NO: 13 - DNA, 500 bp, Homo sapiens
  modified_base (452)..(463): n = a, c, g or t/u
gctggcgacagtgtggccgctgaattacattttgagttgatacttagaaaaagtatttcttcagcttaaaaaattgtttaaaaggttgtgatcatattgtctaccatgtagccagctttcaattatatgtaagagggactttttgacatttacaaataatactttgaggtagatatctgaaagcaccagcacttggaaggtgttcagaagtaacaaattataaaatgagctaacaaaccaaaggcaaaataaaaccgtaaagcaagcagatgggaggcgtgttcagtaacttattcataatgcatctgaaatgattgctgtactcaaatatttaacgttagagtaatagtattttgaatgaaaaccatagttgattgtctttagagagaggagtggactgaaacatacttgaattcgtattgctttcctttaaagctctcctttaaagactntanaaaaaatncgatagcattttcatgtttcagcctacaattcacatt

SEQ ID NO: 14 - DNA, 2898 bp, Homo sapiens
gggccgccgcagaggcccggccgcagcgcagggaagcctgggggccagaggtcgccgctgccgccatgccgctgctcttcctcgagcgcttcccctggcccagcctccgcacctacacgggcctcagcggcctggccctgctgggcaccatcatcagcgcctaccgcgcgctcagccagcccgaggccggccccggcgagccggaccagctaacggcctcgctgcagcctgagccgccggcgcccgcccggccgagcgccgggggaccccgggcccgcgatgtggcccagtacctgctctcagacagcctcttcgtgtgggttctagtaaataccgcttgctgtgttttgatgttggtggctaagctcatccagtgtattgtgtttggccctcttcgagtgagtgagagacagcatctcaaagacaaattttggaattttattttctacaagttcattttcatctttggtgtgctgaatgtccagacagtggaagaggtggtcatgtggtgcctctggtttgccggacttgtctttctgcacctgatggttcagctctgcaaggatcgatttgaatatctttccttctcgcccaccacgccgatgagcagccacggtcgagtcctgtccctgttggttgccatgctgctttcctgctgtggactggcggccgtctgctccatcaccggctacacccacggaatgcacaccttggctttcatggctgcagagtctcttcttgtgacagtgaggactgctcatgtgattttacgatacgtaattcacctctgggacctcaaccacgaagggacgtgggaaggaaaggggacgtatgtctattacacagactttgtcatggagctcactctcctgtccctggacctcatgcaccatattcacatgttgttatttggcaacatctggttatccatggccagcctggtcatctttatgcagctgcgttacctgtttcatgaggtgcaacgtcgaattcgtcggcacaagaactatctacgtgtggttggaaacatggaggccaggtttgcagttgcaactccagaggagctggctgtcaacaatgacgactgtgccatctgttgggactccatgcaggctgcgcggaaactgccctgtggacatcttttccacaactcctgtcttcgttcctggctagaacaagacacctcctgtccaacatgcagaatgtctcttaatattgccgacaataatcgtgtcagggaagaacatcaaggagagaacttggatgagaatttggttcctgtagcagcagccgaagggagacctcgcttaaaccaacacaatcacttcttccatttcgatgggtctcggattgcgagctggctgccgagtttttcggttgaagtgatgcacaccaccaacattcttggcattacgcaggccagcaactcccagctcaatgcaatggctcatcagattcaagagatgtttccccaggttccataccatctggtactgcaggacctccagctgacacgctcagttgaaataacaacagacaatattttagaaggacggattcaagtaccttttcctacacagcggtcagatagcatcagacctgcattgaacagtcctgtggaaaggccaagcagtgaccaggaagagggagaaacttctgctcagaccgagcgtgtgccactggacctcagtcctcgcctggaggagacgctggacttcggcgaggtggaagtggagcccagtgaggtggaagacttcgaggctcgtgggagccgcttctccaagtctgctgatgagagacagcgcatgctggtgcagcgtaaggacgaactcctccagcaagctcgcaaacgtttcttgaacaaaagttctgaagatgatgcggcctcagagagcttcctccccttggaaggtgcgtcctctgaccccgtgaccctgcgtcgaaggatgctggctgccgccgcggaacggaggcttcagaagcagcagacctcctagcgctcccttgccttcctcagctgcctcctgcgccctgtgcccgactgactggaggaggcctgtcccaattctgcccgctccatggaaaagcgggcttgactgcattgccgctgtataaagcatgtggtcttatagtgtttggacagctgataaatttaatccttctttgtaatactttctatgtgacatttctcttccccttagaaacactgcaaattttaactgtaggtatgatctcttctggtgttgactggactgcttggggtggggggcgatcaggaggaagtgagcagtcgcctgcctgcagcaggcagctttctactcctgcctcatgcatacgtcccacaaatgcaggtgtcctgagcaccacacccagtgggaagagtgtgggggaggcgcacagtgtgagcccgcccccacgtcgtggggtaacatctgttatcaaactgctgtcgttgttgtggaagcatgtagactgtgccagaggccagacccacgggctcatgcacccctgagccagcagggcatcttggaaaaggaactcttggttcgatacctggagcagaggaggggaaagtccagggctatagggtgtgatgaagtcacccctttctgtcccactacatctgggactgactttccgagcctccagtccaaagccggcttgatttccgtgaactctggtgctcctgcatctcatgagtgtgccccatgggtcccctcccctctcagcatttccttgtcccgtctggacctgggggagtggttaggcagcaagctttggtttatggttttcattcattggtgaagtaaattaggcagtgctaaagcctgtgggtttggtccttgaacaagatgtgggccttgcaagatgggagagtaaaccttgaagggctttatt

SEQ ID NO: 15 - DNA, 800 bp, Homo sapiens
cgagcggactcgactcggcaccgctgtgcaccatggcccgggccctgtgccgcctcccgcggcgcggcctctggctgctcctggcccatcacctcttcatgaccactgcctgccaggaggctaactacggtgccctcctccgggagctctgcctcacccagttccaggtagacatggaggccgtcggggagacgctgtggtgtgactggggcaggaccatcaggagctacagggagctggccgactgcacctggcacatggcggagaagctgggctgcttctggcccaatgcagaggtggacaggttcttcctggcagtgcatggccgctacttcaggagctgccccatctcaggcagggccgtgcgggacccgcccggcagcatcctctaccccttcatcgtggtccccatcacggtgaccctgctggtgacggcactggtggtctggcagagcaagcgcactgagggcattgtgtaggcggggcccaggctgcccgcgggtgcacccaggctgcagggtgaggccaggcaggcctgggtaggggcagcttctggagccttgggacagagcaggcccacaatgccccccttcttccagccaagaagagctcacaggagtccagagtagccgaggctctggtattaacctggaagcccccctggctggaggccaccgccaccctaggaagggggcagggacgtgaccttgacttacctctggaaagggtcccagcctagactgcttaccccatagccacatttgtggatgagtggtttgtgattaaaagggatgttcttg

SEQ ID NO: 16 - DNA, 2048 bp, Homo sapiens
gggagtaggaggtgtgaccggagggcgaaattggggcttcctctgctctggtgacccagaaccgtcaactgaaatgaccctgtctgtgtagtactccggcaggatgggcctcggagcgtaaaggcggcaaaaacaaaaatattaaaaaaaaggagagagggacaaaaaaaagaaaacccgaaagtttcagctgcattgctgcggaacgttttttagccagaaggcgaaagaagaaatcggaagtgacgtcgcggccaaaacaagcccgggcttggaggcctgtactgaagctggcctcagatgggaaggcccgactcgctgtctgctgtcgtcggtggtcgcgagaccttgcactctcaccgggtcggcctccagcccctgtgcccgggatccgctcgccgcggatgagcgagagtttcttcctgggacttttcgggcacagctggccggtggcgacagaacggactttctttcctgcaagagtctcccctccagcgggagacagcgggctcctgtctcgggacgctgggacacctgtcgcctatttttaaatatccagattccaagaacacactggatactgctcttacaaaaccaagaggaaatcatgaagaaatgttttagttattgaaactacagttgaaatcatggatacatcaacaaatctggatattggagcccagcttatcgtggaagagtgtcccagcacttatagcctaactggcatgccagacattaaaatagaacatccactggacccaaattcagaagaagggtcagctcagggtgttgccatgggaatgaaattcatattgcctaaccgatttgatatgaatgtgtgttctcgatttgtgaagtccttaaatgaagaagatagtaaaaatattcaagatcaggttaactctgacctggaggtggcatctgtcctatttaaagctgaatgcaatatccatacatctccttctccgggaattcaagtaaggcatgtctacaccccctctacaacaaagcatttctcacccataaaacagtcaaccactttaaccaacaaacacagaggaaatgaggtctctaccacacctctgttagcaaattctttgtctgttcaccagttggctgctcagggagagatgctctatctggctactcgtatcgaacaagaaaatgttatcaatcacacggatgaagaaggatttactcctctgatgtgggctgcagcacacgggcaaatagctgtggtagagttcctacttcagaatggtgctgatccccaacttttaggaaaaggtcgagaaagtgcactgtcgttggcctgtagtaaaggctacacagatattgtcaaaatgctgcttgattgtggagttgatgtaaatgaatatgattggaatggaggaacacctctgctttatgctgtacatggaaatcatgtgaaatgtgtaaagatgctcttagaaagtggggctgatccaacaattgaaactgactctggatataattctatggatctagctgtagccctaggctatagaagtgttcaacaggttattgagtcacatttgttgaagctgcttcaaaatatcaaggagtagacacagtcatcagaaaatgtctgcccttttgtttacttcttggtccttataaatgatagttttgtttacttataaatttttacctcagttgcaatatttactggtttttagtaggttttaataaatatttctctgagtaattcactggtttataataaatgtaatactctttttataactatgttttactgtatatttaaaattataaattaatgttttcgtggcatgtaaatttttatggtacagatagttatcatcagtctttgtatcaagtgctgtaatttgacattttcagaaattattctaccctagtcatcttcactcgtgtattaagtcattcactttatatagggtttgctataaatccctagaaaaaaattgttcttattgttgaattaaaaagtgcacagtgtgattgtttacaaaatgatattataaataaataaaatacttcttctg

SEQ ID NO: 17 - DNA, 2164 bp, Homo sapiens
ctaattttatttatttattttagtagagatggggtttcaccatgttacccaggctgctctctaccttctgagctcaagtgatccacctgcctcggcctcccaaagtgctgggattacaggtgtcagccactgtacctggctgaatacttggttttcagtaccacaagaactatgagctggttatccacttcatgtggaatcataagcgtcccaaagtgacaatacatatagattgccaggcagtgaaacagttaagatgccaccatagctttcttttcaacatctttctaagattaccttactatttcttttgttccaagtttgtacttcctcagagttctcacatatggaaaggatacacactttgtagaaacaagaactttatgttatccaagttctaggatagccatgagctccaattatctcagagctctgagtcctctactcaatacccattgagatttatgtgttctgaggcttttgtcttctagctacttacttcattctccatgggtaacgtcattcatccacattaactaatttcctcactccaagctcttttctagagataatctccagtccctgtgcagaaactgtcattgcactttctgctgaaatggcagtttcttctcagcaaggtgagattatggaatccagaatcttttttcaggggtcacatgcccatttccccacttgcatgaatgtcgacactgcagccacagtgttggccgtaaatgtgaatttggcaagtaaccactgttcccagggaaatgtcccaatcagaagaagattatctgggacactgatactgacagggagatgggacattttgagggacccggaggcagggtgccacctcctcaacttccctgagggctgcctagaatctgtttcctctcactctgaattattcttcctcttatggctgaccaaaaacatggaacctcacaaagtccactgtaacagctttatatttgtgaagtgaagaacatgaagacagtttcaagcaaagttattgagtggacactttgtgtttttttttgagaagtctcactctttcacccaggctggagtgcagtggcacgatctcggctcactgcaactccacctcccgggttcacgccattctcttgcctcagcctcccgagtagctgggcctataggttccctccaccacgcccagctaatttttgtatttttagtagagatgggctttcactgcgttggcgaggctggtctcaaactcctgacctcatgatccacccccctcggcctcctaaagtgctgggattacaggcatctgccaccgcactcggcttatccctagaaatcctatgatagcatgatgtataggcacctaaaggcatggcacttgagaaatgtgaataagattgtaagttacaaatagcaaggtacagtcagatgttaacagtctcagcccctaaatgtcaccttgtattacagcatgttatataagcacatacaggcacatacatgaaatagtgatacttcattctcagtaatattttcatccttctcactggaaagatctttgatgatttttaatcaacataggagtttcaatgatatctagaagtttaaaagggctcgttcaaacaaattatgaccgcacacactgaagagtatgtttgtctcttgtggtgtaaatttttttttattacaccaaattatgttcacacaaaatttgtaatcagggggaattaaagagccttcctggaaaatggaggttgcaatcagccgggatggtgccatcgcactctagcctggggaatagagtgagatcctgcctcaaaaaaaacaaaaaaattctttattttctccataaactacagtttatataagcaaaagtttcagtactaagcaattttagtctctgcagtctcttgtcttgaattaatacaattttgttaattctcttatgaagttaatcttcctgcttgtatgtgaattaaatatatgtcaaactttttttgtacaacagattcatacctctttcctgtttgaaattattttactgtgtttcatcaatctaatgtttatttttattacaccagtaatttcctcattgtgttgaatcttacagtggcttataaatctacatgtacctagaaaaaaaaaaaaaaaaaaaaaaaaaaaaaaaaaa

SEQ ID NO: 18 - DNA, 1070 bp, Homo sapiens
ctcccggctacgccatcgacacggtgcaggtcaatgggcaggagaagtacttgatcctctgtgaggtgggcacagatggtctgctggccacatcgctggacgccacctgtgacgttgcctgcttgatgtttgatggcagtgacccaaagtcctttgcacattgtgccagcgtctacaagcaccattacatggacgggcagaccccctgcctctttgtctcctccaaggccgacctgcccgaaggtgtcgcggtgtctggcccatcaccggccgagttttgccgcaagcaccggctacccgctcccgtgccgttctcctgtgctggcccagccgagcccagcaccaccatcttcacccagctcgccaccatggccgccttcccacatttggtccacgcagagctgcatccctcttccttctggctccgggggctgctgggggttgtcggggccgccgtggccgcagtcctcagcttctcactctacagggtcctggtgaagagccagtgaggcccctggtacccaagccccctcccctgacctgggtgtggctcgctgctggggctctgcaggggcagcacagctggggtgcaggccaggctgccactccgggaacgcctttgcgccgggactttttgtttctgaaggcagtcgatctgcagcggggccttatgctgccatgcactgccctggctcctgccggacccccagggtgggccgtggcaggtggctgagcaggagctcccaagtgccggccaccgctgtcagggattgcccacccctgggcatcatgtgtgtggggccggggagcacaggtgtgggagctggtgaccccagacccagaattctcagggctctacccccctttcctggtcctaggtggccagtgggtatgaggagggctggaaggcagagctttgggccaaaagcaggcgttggggggtcccccctcaagtttggagccgtttccgtggttgtagcagaggaccggaggttgggttcctgattaaacttcactgtgtgttttctatctcggaaaaaaaaaaaaaaaaaaaaaaaaaaaaaaaaaaa

SEQ ID NO: 19 - DNA, 4114 bp, Homo sapiens
gggatgaatggcagcacactgtggtctagtcttctccctgaggaggctcgagatatcacatgtttggagctgatgccaggaagcttggctgaaaccatctgccttgtgacagggacacacaagatgctcagcgcattcaatgcaacgtcagggaaagccatttggactttaaacccaaactacttgtccaacggtaccttggctgccccagttgtggtactgccagacttggatgaagacggtgttcgagaccttgtggttctggccattggggaattgcagccagatctgtgctttctgctggtgtctggccggaccggaaatccagtgggtcgacctgtgaagtacaacatcgttggagttgggaatctgattggtcctcaggtttacatcaccacaaatggggctgtctacatcctgtttggctttggaaatatacaagctgtcgcactgcgggacatttttgttcaggcccaaaatcgagacagctcaccaccttctctgcagatagaagagccagaatgggaaaagcgaagatccatcaacctgtctgagctcattgatgtttacagtgatggtgttgaactactccagatggtgaaggcaccagattccaactgcagcaaccttctgattacaaccagacaaagccttgtgctgcttcgggggcaaaatctgacaccttactgggcattgagacttcaaggcctgcgcagccagcctactcctggatatttcactgatgatcagacattagacttccttctgcagatacaggatggagttgggatgaaaaagatgatggttgtggatggtgactctggctccattgtttggagttaccgtgctccgtgtcacatgaaagaaacgccagccacctcagcagttacttcagaccagaagtctgtcttcctcttctgggccgaagggctgtcagctgcatctcccaattccgatatcatcctaggaactgagccgcccagccttcaccacctttacctcctgcatcctgcgttcccctccatccttctggatctggccaacaccaccggcacagtgacggcttcagaggttggaattaacgacctctggaaagatgccttttatgttaccaggacaacagggccaagctccgaaggccatccagcagccctggtggtcagcaagcttagtctacggtgggcactaatggagggccagatggctcagctacaggagtccacccccaaaattggccgtggggagctgcgaagatttctctctaggataaagtttgttgaagctccctacgagatctaatctgatggaatcttcagttgcagaagaagtgaacagagtggataccctctctactctcctgtcactgtaaaatcagttctatggagagaagacttcttcgtcctcatttaccacctccctgatggttgcaaaggcttgggaaggcatgttggagtctttgacggcagcatgatctatttggctggggcatcttacctaccttttcagtccctgcattaatcccctctaggaactctgcgtggaccgtttggaaatgtgaatctcttaagtatttaatttttttggtatgtctaatttatgaagtcttgctgggaaagccagtgaagtctatgactaggaaacattttgttgtacattgtgctgtgtgtgtgtatattttagtgttgtggtgaagttattttccaggtatgtcctaagcttcagggatccagtttcttgtccttctgaaatatatctggtttgtttggtcattttgagacttccagatgccctacctctgatgttgagggccacttatttctctccttattctttcccacctgtaccttggctacttccaaattgtagacagaatgagaaagatttatagtggaagactgagttagccatccaagcattttcatctctcttgttttatatcctatttccttagattttccatccatgtctattaagtgaccacaagaataactatattcctatcacaaggggagcaagaggatgtagtctcagtgacccatctctgaccaagtccacatgttgtgttatatgtggctctgatggttctgccagtcatgatcttttttctgtggcgacatcagaagtgtatgtttgcatgctgtcttcaacttagaggagaactggaagtcaggagcctttgatgtccttatcctgctgtatgtcttctctgcatctttttctatagggcaccctccttagctcccctcactctgttttctcttctattcagggatatgtttctggactttttcttctgctacttgagtccaggatgcaaccattttgtcctgcatctcttctttcctgtagagcctttgaagcattgtattttgggaaaattcttctgtaaatactataacttttataaatggttaagttatttagaattatctccagtgcttacttctcccttcttctgtataaatctgctacttcaattaagttctcctctaaacttttaggtcattgtttatatagcagaaaattcaatgttagcggatggaaaactgcttcttgaataaccttgataggtcatccctgagtgcacctcaggttctctctttacctgggcttgtatcttttttttttttttttttttttttgagacagagttttgctcttgtcgcccaggctggagtgcagtggcacaatctcggctcactgcaaccttcgcctcctgggttcaagcgattctccagccttagcctcccaagtagctgggactacaggtgcccgctaccatgcctggctaatttttttttttgtatttttagtagagacggggtttcaccatgttggccaggctggtcacgaactcctgacctcagataatccacctgcttctgcctcccaaagtgctgggattacaggcgtgagccaccatgcccggctgggcttgtatcttttagcttgtgttagtaaaaggattctagaaaattatgaagtccagattcaaagggatctctgttaattacccactgacaggcattatgacctaacaggaggttggtagcagtagatccaagcatgcatgttgcctggcctgtagattggccttatcaggtttctgggtgcctctgccttaagatcctgaaggcaaattttgtttcaacagtttggaagtcatctgtgggtccagcttgactttggaggaataagaagatacttctagagtatgggaatgattccagataatttctgggatttgaatctacttgagtttaagggcctgggacctaatttggtttagtatagaatttgaagaattaatttataggcagctgaatacccaaaacttgggtggtggtcctgtggtttggctgagctgtccgggcataacctggttctctgttatgttaaggctttctgggaagccagccactctgcgcaggagtgaaacatgaagttgttttctgaggacctgttttggtgggattgtttgggcagaggactgtgtttatgcagggcaaatcccagaaagataagaggaagctagagaaacttaatgtacctgaattcttcatggtgtatttgcaaactaacttaacatagattcttttgactatggtaagtttgaatctctccttgccaaacaacattataagtttagttttcttcttcctcttgcagccggtacggaaaggtgtaagtggtggctgaaaattgaggaagcttcatctgaccaatgtgggtgctggtttcttgtgaaatgtgtccctaagcctccttctccttgcaggcagccacccacccaggtgtctaagataggacatgctcctttctttctctaatcccatcctgaggttgccggcaaagccaatatgaccactactgagaaatagtaatgacttctacaaatgcaagggtcttaccctcctctttcccttaaacaccctcccttttccttagaccccgtttttgccatcccccaaatgtgtggtatggtgaaactaatcccctgaatgtgaattgctatccttattgccctattaaagaagagccagctggtatattgtcaggaagcactatttaaaatgtgaactgttatagagtaaataaataaatactctacagg

SEQ ID NO: 20 - DNA, 478 bp, Homo sapiens
  modified_base (381): n = a, c, g or t/u
caatttaccaaaatatctgtattatctataaaaattgaactctaatgagtcactgatacgggaggcagcaatacccgactgtgctgacatgcagaaggaagacagctctgtcccaccaaccctatagcagaacatttgcattgagtggcacgtgggctgagtcatttgtaaggtctcaaaaacctggacactttggaacgtagcaatcggatgaacgatcttggaaacatctctcgggactcctgggctgtgtacttgaaatagttctggggatgggccaggacatcaaacagagccttgataagtttcttatccttaagtatttcctgatggttctcagatgcatagagcctgccatctcgaactatgtcttcaatgagnttcctgtagtcctcatcatatgtcacgtatgggacctggaaccctctagcgctgttcccttcattggacttgaactgaatccacagcttctttgacc

SEQ ID NO: 21 - DNA, 7239 bp, Homo sapiens
cggggcagccgagggcccctgactcggctcctcgcggcgacatggatcggatggccagctccatgaagcaggtgcccaacccactgcccaaggtgctgagccggcgcggggtcggcgctgggctggaggcggcggagcgcgagagcttcgagcggactcagactgtcagcatcaataaggccattaatacgcaggaagtggctgtaaaggaaaaacacgccagaacgtgcatactgggcacccaccatgagaaaggggcacagaccttctggtctgttgtcaaccgcctgcctctgtctagcaacgcagtgctctgctggaagttctgccatgtgttccacaaactcctccgagatggacacccgaacgtcctgaaggactctctgagatacagaaatgaattgagtgacatgagcaggatgtggggccacctgagcgaggggtatggccagctgtgcagcatctacctgaaactgctaagaaccaagatggagtaccacaccaaaaatcccaggttcccaggcaacctgcagatgagtgaccgccagctggacgaggctggagaaagtgacgtgaacaactttttccagttaacagtggagatgtttgactacctggagtgtgaactcaacctcttccaaacagtattcaactccctggacatgtcccgctctgtgtccgtgacggcagcagggcagtgccgcctcgccccgctgatccaggtcatcttggactgcagccacctttatgactacactgtcaagcttctcttcaaactccactcctgcctcccagctgacaccctgcaaggccaccgggaccgcttcatggagcagtttacaaagttgaaagatctgttctaccgctccagcaacctgcagtacttcaagcggctcattcagatcccccagctgcctgagaacccacccaacttcctgcgagcctcagccctgtcagaacatatcagccctgtggtggtgatccctgcagaggcctcatcccccgacagcgagccagtcctagagaaggatgacctcatggacatggatgcctctcagcagaatttatttgacaacaagtttgatgacatctttggcagttcattcagcagtgatcccttcaatttcaacagtcaaaatggtgtgaacaaggatgagaaggaccacttaattgagcgactatacagagagatcagtggattgaaggcacagctagaaaacatgaagactgagagccagcgggttgtgctgcagctgaagggccacgtcagcgagctggaagcagatctggccgagcagcagcacctgcggcagcaggcggccgacgactgtgaattcctgcgggcagaactggacgagctcaggaggcagcgggaggacaccgagaaggctcagcggagcctgtctgagatagaaaggaaagctcaagccaatgaacagcgatatagcaagctaaaggagaagtacagcgagctggttcagaaccacgctgacctgctgcggaagaatgcagaggtgaccaaacaggtgtccatggccagacaagcccaggtagatttggaacgagagaaaaaagagctggaggattcgttggagcgcatcagtgaccagggccagcggaagactcaagaacagctggaagttctagagagcttgaagcaggaacttgccacaagccaacgggagcttcaggttctgcaaggcagcctggaaacttctgcccagtcagaagcaaactgggcagccgagttcgccgagctagagaaggagcgggacagcctggtgagtggcgcagctcatagggaggaggaattatctgctcttcggaaagaactgcaggacactcagctcaaactggccagcacagaggaatctatgtgccagcttgccaaagaccaacgaaaaatgcttctggtggggtccaggaaggctgcggagcaggtgatacaagacgccctgaaccagcttgaagaacctcctctcatcagctgcgctgggtctgcagatcacctcctctccacggtcacatccatttccagctgcatcgagcaactggagaaaagctggagccagtatctggcctgcccagaagacatcagtggacttctccattccataaccctgctggcccacttgaccagcgacgccattgctcatggtgccaccacctgcctcagagccccacctgagcctgccgactcactgaccgaggcctgtaagcagtatggcagggaaaccctcgcctacctggcctccctggaggaagagggaagccttgagaatgccgacagcacagccatgaggaactgcctgagcaagatcaaggccatcggcgaggagctcctgcccaggggactggacatcaagcaggaggagctgggggacctggtggacaaggagatggcggccacttcagctgctattgaaactgccacggccagaatagaggagatgctcagcaaatcccgagcaggagacacaggagtcaaattggaggtgaatgaaaggatccttggttgctgtaccagcctcatgcaagctattcaggtgctcatcgtggcctctaaggacctccagagagagattgtggagagcggcaggggtacagcatcccctaaagagttttatgccaagaactctcgatggacagaaggacttatctcagcctccaaggctgtgggctggggagccactgtcatggtggatgcagctgatctggtggtacaaggcagagggaaatttgaggagctaatggtgtgttctcatgaaattgctgctagcacagcccagcttgtggctgcatccaaggtgaaagctgataaggacagccccaacctagcccagctgcagcaggcctctcggggagtgaaccaggccactgccggcgttgtggcctcaaccatttccggcaaatcacagatcgaagagacagacaacatggacttctcaagcatgacgctgacacagatcaaacgccaagagatggattctcaggttagggtgctagagctagaaaatgaattgcagaaggagcgtcaaaaactgggagagcttcggaaaaagcactacgagcttgctggtgttgctgagggctgggaagaaggaacagaggcatctccacctacactgcaagaagtggtaaccgaaaaagaatagagccaaaccaacaccccatatgtcagtgtaaatccttgttacctatctcgtgtgtgttatttccccagccacaggccaaatccttggagtcccaggggcagccacaccactgccattacccagtgccgaggacatgcatgacacttccaaagactccctccatagcgacaccctttctgtttggacccatggtcatctctgttcttttcccgcctccctagttagcatccaggctggccagtgctgcccatgagcaagcctaggtacgaagaggggtggtggggggcagggccactcaacagagaggaccaacatccagtcctgctgactatttgacccccacaacaatgggtatccttaatagaggagctgcttgttgtttgttgacagcttggaaagggaagatcttatgccttttcttttctgttttcttctcagtcttttcagtttcatcatttgcacaaacttgtgagcatcagagggctgatggattccaaaccaggacactaccctgagatctgcacagtcagaaggacggcaggagtgtcctggctgtgaatgccaaagccattctccccctctttgggcagtgccatggatttccactgcttcttatggtggttggttgggttttttggttttgtttttttttttaagtttcactcacatagccaactctcccaaagggcacacccctggggctgagtctccagggccccccaactgtggtagctccagcgatggtgctgcccaggcctctcggtgctccatctccgcctccacactgaccaagtgctggcccacccagtccatgctccagggtcaggcggagctgctgagtgacagctttcctcaaaaagcagaaggagagtgagtgcctttccctcctaaagctgaatcccggcggaaagcctctgtccgcctttacaagggagaagacaacagaaagagggacaagagggttcacacagcccagttcccgtgacgaggctcaaaaacttgatcacatgcttgaatggagctggtgagatcaacaacactacttccctgccggaatgaactgtccgtgaatggtctctgtcaagcgggccgtctcccttggcccagagacggagtgtgggagtgattcccaactcctttctgcagacgtctgccttggcatcctcttgaataggaagatcgttccaccttctacgcaattgacaaacccggaagatcagatgcaattgctcccatcagggaagaaccctatacttggtttgctacccttagtatttattactaacctcccttaagcagcaacagcctacaaagagatgcttggagcaatcagaacttcaggtgtgactctagcaaggctcatctttctgcccggctacatcagccttcaagaatcagaagaaaggccaaggtgctggactgttactgacttggatcccaaagcaaggagatcatttggagctcttgggtcagagaaaatgagaaaggacagagccagcggctccaactcctttcagccacatgccccaggctctcgctgccctgtggacaggatgaggacagagggcacatgaacagcttgccagggatgggcagcccaacagcacttttcctcttctagatggaccccagcatttaagtgaccttctgatcttggaaaaacagcgtcttccttctttatctatagcaactcattggtggtagccatcaagcacttcccaggatctgctccaacagaatattgctaggttttgctacatgacgggttgtgagacttctgtttgatcactgtgaaccaacccccatctccctagcccacccccctccccaactccctctctgtgcattttctaagtgggacattcaaaaaactctctcccaggacctcggatgaccatactcagacgtgtgacctccatactgggctaaggaagtatcagcactagaaattgggcagtcttaatgttgaatgctgctttctgcttagtatttttttgattcaaggctcagaaggaatggtgcgtggcttccctgtcccagttgtggcaactaaaccaatcggtgtgttcttgatgcgggtcaacatttccaaaagtggctagtcctcacttctagatctcagccattctaactcatatgttcccaattaccaaggggtggccgggcacagtggctcacgcctgtaatcccagcactttgagaggctgaggtggtaggatcacctgaggtcaggagttcaagaccagcctgtccaacatggtgaaacccccatctctactaaaaataccaaaaattagccgagcgtagtgacgggtgcccgtaatcccagctactcaggaggctgagacaggagaatcacctgaaccccagaggcagaggttgcagtgagctgagatcacgccattgtactccagcctgggcaacaagagcaaaactccgtctcaaaaaaaaaaaaaaattacaaatggggcaaacagtctagtgtaatggatcaaattaagattctctgcccagccgggcacagtggcgcatgcctgtaatcccagaactttgggaggccaagacgggatgattgcttgagctcaggagtttgagaccaggctgggcatcatagcaagacctcatctctactaaaattcaaaaacaaaattagccgggcatgatggtgcatgcctgtagtctcagctagttggggagctaaggtgggagaattgcttgagcttgggaagtcgaggctgcagtcagccctgattgtgccagtgcactccggcctgggtgacagagtgagaccctgtctcaaaaaaaaaaagattctgtgtcagagcccagcccaggagtttgaggctgcaatgagccatgatttcccactgcactccagcctgagtgacagagcgagactccatctctttaaaaacaaacaaaaaattatctgaatgatcctgtctctaaaaagaagccacagaaatgtttaaaaacttcatcgacttagcctgagtcataacggttaagaaagcacttaaacagaagcagaggctaattcagtgtcacatgaggaagtagctgtcagatgtcacataattactttcgtaatagctcagattagaatggctaccccattctctagacaaaatcaaattgtcctattgtgactcttctaaaaatgaagatgaagagctatttaatgacacaccttggattaaaacgggaatcacatcttaaagctaaaaatgaacctgcaagccttctaaatgagtcactgagcatcactagtgacaagtctcgggtgagcgtaaatgggtcatgacaagatgggacagcaacaaaatcatggcttaggatcgacaagaagttaaaaaacagctgcatctgttacttaagtttgtaagacagtgccctgagacctctagagaaaagatgtttgtttacataagagaaagaggccagacatggtgtctcacacgtttaatcccagcactttgggaggcaggggcgggtggatcacctgaggtcaggagttcaagactagcctggccaacatggtgaaaccccgtctctactaaaaatacaaaaattagccgggcatggtggcaggcgcctataatcccagctactggggaggctgaggcaggagaatcacttgaacccgggggacagaggttgtagtgagccaagatcgcaccactgcactccagcctgggtcacagagtgagactccatctcaaaaaaaaaaaagagagagagagagaaagaaatagaagagaagagccatcttggcagggttattttatatctgagcaaggagtttaaatgagactagtttagattgtctgctgatgcagccgtccatagcagtacccctaaaatcccaccagaatacgggtccctctaacccagtggctggaagaaccactgtctagagcaacttttcttggaactgtcccagctaccaagtcagacaccaaggtttatgccaccaggtaacacgggaatcacaggtacatgtcgctccggtcagattagttggctttggcccctcgaccctgtgcaggagctagttctcagcttgcagctggaagttccctct

SEQ ID NO: 22 - DNA, 593 bp, Homo sapiens
  modified_base (575)..(592): n = a, c, g or t/u
caggaaagtagtcaattatcatgtttataaggttgggtgggctaggtaagatgatgtagagggtgacattaaagtgtagaacagagaccacttaggtggaagcaggcagccttggactttgctaaagaccagtccatgtgactgacatggggtcacttcaaatggtagtgcctccctcactgaagagcatcagaagggcttctgagcaaggccagaatgagcctcgatgaacatccaagttgaccaaccagtgtggtgcctaacagaggacagagccaccagcaggggtgctcaggggctgctccccttttattaatgacagcggtttctctcaaggaagtgtagtgccctcccctttgggatagttgcctgacccctgtccatcagcccttcaagtaccctcatcagaaaaagagcccgcgcattctcctgccgatgccttgtcggtcgtagaggacattgaacttgttcacaaactggttcatggtgttgcacgttttggtgatggtgccgaggtaggcatgagcccacgtcgttgcatgatcataaaaactgcttgaattgtctgtgctganaccgggagnagctcgtnc

SEQ ID NO: 23 - DNA, 2593 bp, Homo sapiens
ggccagcgcgtctgcttgttcgtgtgtgtgtcgttgcaggccttattcatgggctcaccgctgaggttcgacgggcgggtggtactggtcaccggcgcgggggcaggattgggccgagcctatgccctggcttttgcagaaagaggagcgttagttgttgtgaatgatttgggaggggacttcaaaggagttggtaaaggctccttagctgctgataaggttgttgaagaaataagaaggagaggtggaaaagcagtggccaactatgattcagtggaagaaggagagaaggttgtgaagacagccctggatgcttttggaagaatagatgttgtggtcaacaatgctggaattctgagggatcgttcctttgctaggataagtgatgaagactgggatataatccacagagttcatttgcggggttcattccaagtgacacgggcagcatgggaacacatgaagaaacagaagtatggaaggattattatgacttcatcagcttcaggaatatatggcaactttggccaggccaattatagtgctgcaaagttgggtcttctgggccttgcaaattctcttgcaattgaaggcaggaaaagcaacattcattgtaacaccattgctcctaatgcgggatcacggatgactcagacagttatgcctgaagatcttgtggaagccctgaagccagagtatgtggcacctcttgtcctttggctttgtcacgagagttgtgaggagaatggtggcttgtttgaggttggagcaggatggattggaaaattacgctgggagcggactcttggagctattgtaagacaaaagaatcacccaatgactcctgaggcagtcaaggctaactggaagaagatctgtgactttgagaatgccagcaagcctcagagtatccaagaatcaactggcagtataattgaagttctgagtaaaatagattcagaaggaggagtttcagcaaatcatactagtcgtgcaacgtctacagcaacatcaggatttgctggagctattggccagaaactccctccattttcttatgcttatacggaactggaagctattatgtatgcccttggagtgggagcgtcaatcaaggatccaaaagatttgaaatttatttatgaaggaagttctgatttctcctgtttgcccaccttcggagttatcataggtcagaaatctatgatgggtggaggattagcagaaattcctggactttcaatcaactttgcaaaggttcttcatggagagcagtacttagagttatataaaccacttcccagagcaggaaaattaaaatgtgaagcagttgttgctgatgtcctagataaaggatccggtgtagtgattattatggatgtctattcttattctgagaaggaacttatatgccacaatcagttctctctctttcttgttggctctggaggctttggtggaaaacggacatcagacaaagtcaaggtagctgtagccatacctaatagacctcctgatgctgtacttacagataccacctctcttaatcaggctgctttgtaccgcctcagtggagactggaatcccttacacattgatcctaactttgctagtctagcaggttttgacaagcccatattacatggattatgtacatttggattttctgccaggcgtgtgttacagcagtttgcagataatgatgtgtcaagattcaaggcaattaaggctcgttttgcaaaaccagtatatccaggacaaactctacaaactgagatgtggaaggaaggaaacagaattcattttcaaaccaaggtccaagaaactggagacattgtcatttcaaatgcatatgtggatcttgcaccaacatctggtacttcagctaagacaccctctgagggcgggaagcttcagagtacctttgtatttgaggaaataggacgccgcctaaaggatattgggcctgaggtggtgaagaaagtaaatgctgtatttgagtggcatataaccaaaggcggaaatattggggctaagtggactattgacctgaaaagtggttctggaaaagtgtaccaaggccctgcaaaaggtgctgctgatacaacaatcatactttcagatgaagatttcatggaggtggtcctgggcaagcttgaccctcagaaggcattctttagtggcaggctgaaggccagagggaacatcatgctgagccagaaacttcagatgattcttaaagactacgccaagctctgaagggcacactacactattaataaaaatggaatcattaaatactctcttcacccaaatatgcttgattattctgcaaaagtgattagaactaagatgcaggggaaattgcttaacattttcagatatcagataactgcagattttcattttctactaattttcatgtatcattatttttacaaggaactatatataagctagcacatgattatccttctgttcttagatctgtatcttcataataaaaaattttgcccaagtcctgtttccttagaatttgtgatagcattgataagttgaaaggaaaattaaatcaataaaggcctttgatacc

SEQ ID NO: 24 - DNA, 6266 bp, Homo sapiens
cgttgtttggcgtgtttttttttttgttttttgtcactgcctgcctgggtcctgcccgaggtctccatcctcggtttccctgtccttgccccgggccctgggagtgctctggaaggctgcgcagtattggaggggacagaatgaccttccggccttgagtccctggggagcagatggaccctactggaagtcagttggattcagatttctctcagcaagatactccttgcctgataattgaagattctcagcctgaaagccaggttctagaggatgattctggttctcacttcagtatgctatctcgacaccttcctaatctccagacgcacaaagaaaatcctgtgttggatgttgtgtccaatcctgaacaaacagctggagaagaacgaggagacggtaatagtgggttcaatgaacatttgaaagaaaacaaggttgcagaccctgtggattcttctaacttggacacatgtggttccatcagtcaggtcattgagcagttacctcagccaaacaggacaagcagtgttctgggaatgtcagtggaatctgctcctgctgtggaggaagagaagggagaagagttggaacagaaggagaaagagaaggaagaagatacttcaggcaatactacacattcccttggtgctgaagatactgcctcatcacagttgggttttggggttctggaactctcccagagccaggatgttgaggaaaatactgtgccatatgaagtggacaaagagcagctacaatcagtaaccaccaactctggttataccaggctgtctgatgtggatgctaatactgcaattaagcatgaagaacagtccaacgaagatatccccatagcagaacagtccagcaaggacatccctgtgacagcacagcccagtaaggatgtacatgttgtaaaagagcaaaatccaccacctgcaaggtcagaggacatgccttttagccccaaagcatctgttgctgctatggaagcaaaagaacagttgtctgcacaagaacttatggaaagtggactgcagattcagaagtcaccagagcctgaggttttgtcaactcaggaagacttgtttgaccagagcaataaaacagtatcttctgatggttgctctactccttcaagggaggaaggtgggtgttctttggcttccactcctgccaccactctgcatctcctgcagctctctggtcagaggtcccttgttcaggacagtctttccacgaattcttcagatcttgttgctccttctcctgatgctttccgatctactccttttatcgttcctagcagtcccacagagcaagaagggagacaagataagccaatggacacgtcagtgttatctgaagaaggaggagagccttttcagaagaaacttcaaagtggtgaaccagtggagttagaaaacccccctctcctgcctgagtccactgtatcaccacaagcctcaacaccaatatctcagagcacaccagtcttccctcctgggtcacttcctatcccatcccagcctcagttttctcatgacatttttattccttccccaagtctggaagaacaatcaaatgatgggaagaaagatggagatatgcatagttcatctttgacagttgagtgttctaaaacttcagagattgaaccaaagaattcccctgaggatcttgggctatctttgacaggggattcttgcaagttgatgctttctacaagtgaatatagtcagtccccaaagatggagagcttgagttctcacagaattgatgaagatggagaaaacacacagattgaggatacggaacccatgtctccagttctcaattctaaatttgttcctgctgaaaatgatagtatcctgatgaatccagcacaggatggtgaagtacaactgagtcagaatgatgacaaaacaaagggagatgatacagacaccagggatgacattagtattttagccactggttgcaagggcagagaagaaacggtagcagaagatgtttgtattgatctcacttgtgattcggggagtcaggcagttccgtcaccagctactcgatctgaggcactttctagtgtgttagatcaggaggaagctatggaaattaaagaacaccatccagaggaggggtcttcagggtctgaggtggaagaaatccctgagacaccttgtgaaagtcaaggagaggaactcaaagaagaaaatatggagagtgttccgttgcacctttctctgactgaaactcagtcccaagggttgtgtcttcaaaaggaaatgccaaaaaaagaatgctcagaagctatggaagttgaaaccagtgtgattagtattgattcccctcaaaagttggcaatacttgaccaagaattggaacataaggaacaggaagcttgggaagaagctacttcagaggactccagtgttgtcattgtagatgtgaaagagccatctcccagagttgatgtttcttgtgaacctttggagggagtggagaagtgctcagattcccagtcatgggaggatattgctccagaaatagaaccatgtgctgagaatagattagacaccaaggaagaaaagagtgtagaatatgaaggagatctgaaatcagggactgcagaaacagaacctgtagagcaagattcttcacagccttccttacctttagtgagagcagatgatcctttaagacttgaccaggagttgcagcagccccaaactcaggagaaaacaagtaattcattaacagaagactcaaaaatggctaatgcaaagcagctaagctcagatgcagaggcccagaagctggggaagccctctgcccatgcctcacaaagcttctgtgaaagttctagtgaaaccccatttcatttcactttgcctaaagaaggtgatatcatcccaccattgactggtgcaaccccacctcttattgggcacctaaaattggagcccaagagacacagtactcctattggtattagcaactatccagaaagcaccatagcaaccagtgatgtcatgtctgaaagcatggtggagacccatgatcccatacttgggagtggaaaaggggattctggggctgccccagacgtggatgataaattatgtctaagaatgaaactggttagtcctgagactgaggcgagtgaagagtctttgcagttcaacctggaaaagcctgcaactggtgaaagaaaaaatggatctactgctgttgctgagtctgttgccagtccccagaagaccatgtctgtgttgagctgtatctgtgaagccaggcaagagaatgaggctcgaagtgaggatccccccaccacacccatcagggggaacttgctccactttccaagttctcaaggagaagaggagaaagaaaaattggagggtgaccatacaatcaggcagagtcaacagcctatgaagcccattagtcctgtcaaggaccctgtttctcctgcttcccagaagatggtcatacaagggccatccagtcctcaaggagaggcaatggtgacagatgtgctagaagaccagaaagaaggacggagtactaataaggaaaatcctagtaaggccttgattgaaaggcccagccaaaataacataggaatccaaaccatggagtgttccttgagggtcccagaaactgtttcagcagcaacccagactataaagaatgtgtgtgagcaggggaccagtacagtggaccagaactttggaaagcaagatgccacagttcagactgagagggggagtggtgagaaaccagtcagtgctcctggggatgatacagagtcgctccatagccagggagaagaagagtttgatatgcctcagcctccacatggccatgtcttacatcgtcacatgagaacaatccgggaagtacgcacacttgtcactcgtgtcattacagatgtgtattatgtggatggaacagaagtagaaagaaaagtaactgaggagactgaagagccaattgtagagtgtcaggagtgtgaaactgaagtttccccttcacagactgggggctcctcaggtgacctgggggatatcagctccttctcctccaaggcatccagcttacaccgcacatcaagtgggacaagtctctcagctatgcacagcagtggaagctcagggaaaggagccggaccactcagagggaaaaccagcgggacagaacccgcagattttgccttacccagctcccgaggaggcccaggaaaactgagtcctagaaaaggggtcagtcagacagggacgccagtgtgtgaggaggatggtgatgcaggccttggcatcagacagggagggaaggctccagtcacgcctcgtgggcgtgggcgaaggggccgcccaccttctcggaccactggaaccagagaaacagctgtgcctggccccttgggcatagaggacatttcacctaacttgtcaccagatgataaatccttcagccgtgtcgtgccccgagtgccagactccaccagacgaacagatgtgggtgctggtgctttgcgtcgtagtgactctccagaaattcctttccaggctgctgctggcccttctgatggcttagatgcctcctctccaggaaatagctttgtagggctccgtgttgtagccaagtggtcatccaatggctacttttactctgggaaaatcacacgagatgtcggagctgggaagtataaattgctctttgatgatgggtacgaatgtgatgtgttgggcaaagacattctgttatgtgaccccatcccgctggacactgaagtgacggccctctcggaggatgagtatttcagtgcaggagtggtgaaaggacataggaaggagtctggggaactgtactacagcattgaaaaagaaggccaaagaaagtggtataagcgaatggctgtcatcctgtccttggagcaaggaaacagactgagagagcagtatgggcttggcccctatgaagcagtaacacctcttacaaaggcagcagatatcagcttagacaatttggtggaagggaagcggaaacggcgcagtaacgtcagctccccagccacccctactgcctccagtagcagcagcacaacccctacccgaaagatcacagaaagtcctcgtgcctccatgggagttctctcaggcaaaagaaaacttatcacttctgaagaggaacggtcccctgccaagcgaggtcgcaagtctgccacagtaaaacctggtgcagtaggggcaggagagtttgtgagcccctgtgagagtggagacaacaccggtgaaccctctgccctggaagagcagagagggcctttgcctctcaacaagaccttgtttctgggctacgcatttctccttaccatggccacaaccagtgacaagttggccagccgctccaaactgccagatggtcctacaggaagcagtgaagaagaggaggaatttttggaaattcctcctttcaacaagcagtatacagaatcccagcttcgagcaggagctggctatatccttgaagatttcaatgaagcccagtgtaacacagcttaccagtgtcttctaattgcggatcagcattgtcgaacccggaagtacttcctgtgccttgccagtgggattccttgtgtgtctcatgtctgggtccatgatagttgccatgccaaccagctccagaactaccgtaattatctgttgccagctgggtacagccttgaggagcaaagaattctggactggcaaccccgtgaaaatcctttccagaatctgaaggtactcttggtatcagaccaacagcagaacttcctggagctctggtctgagatcctcatgactggtggtgcagcctctgtgaagcagcaccattcaagtgcccataacaaagatattgctttaggggtatttgatgtggtggtgacggacccctcatgcccagcctcggtgctgaagtgtgctgaagcattgcagctgcctgtggtgtcacaagagtgggtgatccagtgcctcattgttggggagagaattggattcaagcagcatccaaaatataaacacgattatgtttctcactaaagatacttggtcttactggttttattccctgctatcgtggagattgtgttttaaccaggttttaaatgtgtcttgtgtgtaactggattccttgcatggatcttgtatatagttttatttgctgaacttttatgataaaataaatgttgaatctctttggttgtagtaactggg

SEQ ID NO: 25 - DNA, 5009 bp, Homo sapiens
gggggagcaaaagatcacaggctgacactcccagcagggtagatcctgggaatctgatctcctggcctcccccacatcctcccccctccacttcctggagcagcgacctgcccccttcccgcctgcacttccctccacttccagggccgggcttctcctcacaccagccagacagcctaccctccgcccaggggaagcggctgcctccgccaggccgcttccaggaagccccgggccaggccccagcattgttcaggccctggggccagcaccccagccagccgaacaccatgaagtccagcggccctgtggagaggctgctcagagccctggggaggagggacagcagccgggccgcaagcaggcctaggaaagctgagcctcatagcttccgggagaaggttttccggaagaaacctccagtctgtgcagtatgtaaggtgaccatcgatgggacaggcgtttcgtgcagagtctgcaaggtggcgacgcacagaaaatgtgaagcaaaggtgacttcagcctgtcaggccttgcctcccgtggagttgcggcgaaacacggccccagtcaggcgcatagagcacctgggatccaccaaatctctgaaccactcaaagcagcgcagcactctgcccaggagcttcagcctggacccgctcatggagcggcgctgggacttagacctcacctacgtgacggagcgcatcttggccgccgccttccccgcgcggcccgatgaacagcggcaccggggccacctgcgcgagctggcccatgtgctgcaatccaagcaccgggacaagtacctgctcttcaacctttcagagaaaaggcatgacctgacccgcttaaaccccaaggttcaagacttcggctggcctgagctgcatgctccacccctggacaagctgtgctccatctgcaaagccatggagacatggctcagtgctgacccacagcacgtggtcgtactatactgcaagggaaacaagggcaagcttggggtcatcgtttctgcctacatgcactacagcaagatctctgcaggggcggaccaggcactggccactcttaccatgcggaaattctgcgaggacaaggtggccacagaactgcagccctcccagcgtcgatatatcagctacttcagtgggctgctatctggctccatcagaatgaacagcagccctctcttcctgcactatgtgctcatccccatgctgccagcctttgaacctggcacaggcttccagcccttccttaaaatctaccagtccatgcagcttgtctacacatctggagtctatcacattgcaggccctggtccccagcagctttgcatcagcctggagccagccctcctcctcaaaggcgatgtcatggtaacatgttatcacaagggtggccggggcacagaccggaccctcgtgttccgagtccagttccacacctgcaccatccacggaccacagctcactttccccaaggaccagcttgacgaggcctggactgatgagaggttccccttccaagcctccgtggagtttgtcttctcctccagccccgagaagatcaaaggcagcactccacggaacgacccctcggtctctgtcgactacaacaccactgagccagccgtgcgctgggactcctatgagaacttcaaccagcaccacgaggacagtgtggatggctccttgacccacacccggggtcccctggatggcagtccttatgcccaggtgcagcggcctccccggcagacccccccggcaccctctccagagcctccaccaccccccatgctctctgtcagcagcgactcaggccattcctccacgctgaccacagagccggctgctgagtcccctggccggccgccccctacagctgctgaacggcaggagctggatcgcctcctaggaggctgcggagtggccagtgggggccggggagctgggcgcgagacggccatcctagatgacgaagagcagcccactgtgggcggaggcccccacctcggagtgtatccaggccataggcctggcctcagccgccactgctcctgccgccagggctaccgggagccctgcggggttcccaatgggggctactaccggccagagggaaccctggagaggaggcgactggcctacgggggctatgagggatccccccagggctacgccgaggcctcgatggagaagaggcgcctctgccgatcgctgtcagaggggctatacccctacccacctgagatggggaaaccagccactggggactttggctaccgcgccccaggctaccgggaggtggtcatcctggaggaccctgggctgcctgccctatacccatgcccagcctgcgaggagaagctggcgctgcctacagcagccttgtatggactgcggctggagagggaggctggagaagggtgggcaagtgaggctggcaagcctctcctgcacccagtgcggcctgggcacccgctgcctctgctcttgcctgcctgtgggcatcaccatgccccgatgcctgactacagctgcctgaagccacccaaggcaggcgaggaagggcacgagggctgctcctacaccatgtgccccgaaggcaggtatgggcatccagggtaccctgccctggtgacatacagctatggaggagcagttcccagttactgcccagcatatggccgtgtgcctcatagctgtggctctccaggagagggcagagggtatcccagccctggtgcccactccccacgggctggctccatttccccgggcagcccgccctatccacaatctaggaagctgagctacgagatccctacggaggagggaggggacaggtacccattgcctgggcacctggcctcagcaggacctttggcatctgcagagtcgctggagccggtgtcctggagggagggccccagtgggcacagcacactgcctcggtctccccgagatgccccatgcagtgcttcgtcagagttgtctggtccctccacgcccctgcacaccagcagtccagtccagggcaaggaaagcacccggcgacaggacaccaggtcccccacctcagcgcccactcagagactgagtcctggcgaggccttgccccctgtttcccaggcaggcaccggaaaggcccctgagctgccgtcgggaagtgggcctgagcctctggcccctagcccagtctctccgaccttccctcccagctcgcccagtgactggcctcaggaaaggagtccagggggccactcagatggcgccagtcctcggagccctgtgcccaccacacttcctggcctccgccacgccccctggcaaggccctcgaggcccccccgacagcccagatgggtctcccctcactcctgtgccttcccagatgccctggcttgtggccagcccagagccgcctcagagctcacctacacctgctttccccctggctgcctcctatgacaccaatggccttagccagcccccacttcctgagaaacgccacctgcccgggccggggcaacagccaggaccctggggcccagagcaggcatcatcgccagccagaggcatcagtcaccatgtcaccttcgcacctctgctctcagataatgtcccccaaaccccagagcctcctacacaagagagccaaagcaatgtcaagtttgtccaggatacatccaagttctggtacaagccacacctgtcccgtgaccaagccattgccctgctgaaggacaaggaccctggggccttcctgatcagggacagtcattcattccaaggagcttatgggctggccctcaaggtggccacaccgccacccagtgcccagccctggaaaggggaccccgtggaacagctggtccgccatttcctcatcgagactgggcccaaaggggtgaagatcaagggctgccccagtgagccctactttggcagcctgtccgccttggtctcccagcactccatctcccccatctccctgccctgctgcctgcgcattctcagcaaagatcctctggaagagaccccagaggctccagtgcccaccaacatgagcacagcggcagacctcctgcgtcagggtgctgcctgcagcgtgctctacttgacctcagtggagacagagtcactgacgggcccccaagctgtggcccgggccagctctgcagctctgagctgtagcccccgcccgacaccagctgttgtccacttcaaggtgtcagcccagggcattacactgacggacaaccaaaggaagctcttctttcgccgccattatccagtgaacagcatcaccttctccagcactgaccctcaagaccggagatggaccaacccagacgggaccacctccaagatctttggtttcgtggccaagaagccgggaagcccctgggagaatgtgtgtcacctctttgcagagcttgacccagatcagcctgctggcgccattgtcaccttcatcaccaaagttctactgggccagagaaaatgaaggaaggccacaagctcagagcccacatcaacactgcccccctcccagcaccccacagccctcacatcccctggcctggacccaggagacccaggagaaagcaccctcccttaggaatgaggagtgggcatcaggcctgggacactgctctccttccccgcccccagcctgctaagttaagtggacaggcccacaagatgaccttgcatgtgagcagatggcagagatgggtgtgtgaggggtgaggaggcatcagcagttgagccccgaaggagatcaggcagccccacctgcaggagaacgtcagccctccaggggatcagcccctgccagttccacccagctgcaggtgccagcacggcagggatgggagaggggtggggagcgagtcactgcctcctctgagcagagattcagagtaggatcacatgaataggggaaaaaagagagtctatttttgtctaataataaagaatttctataaacttt

SEQ ID NO: 26 - DNA, 956 bp, Homo sapiens
aagtaaatgcagcactagtgggtgggattgaggctatgccctggtgcataaatagagactcagctgtgctggcacactcagaagcttggaccgcatcctagccgccgactcacacaaggcaggtgggtgaggaaatccagagttgccatggagaaaattccagtgtcagcattcttgctccttgtggccctctcctacactctggccagagataccacagtcaaacctggagccaaaaaggacacaaaggactctcgacccaaactgccccagaccctctccagaggttggggtgaccaactcatctggactcagacatatgaagaagctctatataaatccaagacaagcaacaaacccttgatgattattcatcacttggatgagtgcccacacagtcaagctttaaagaaagtgtttgctgaaaataaagaaatccagaaattggcagagcagtttgtcctcctcaatctggtttatgaaacaactgacaaacacctttctcctgatggccagtatgtccccaggattatgtttgttgacccatctctgacagttagagccgatatcactggaagatattcaaatcgtctctatgcttacgaacctgcagatacagctctgttgcttgacaacatgaagaaagctctcaagttgctgaagactgaattgtaaagaaaaaaaatctccaagcccttctgtctgtcaggccttgagacttgaaaccagaagaagtgtgagaagactggctagtgtggaagcatagtgaacacactgattaggttatggtttaatgttacaacaactattttttaagaaaaacaagttttagaaatttggtttcaagtgtacatgtgtgaaaacaatattgtatactaccatagtgagccatgattttctaaaaaaaaaaataaatgttttgggggtgttctgttttctccaaaaaaaaaaaaaaa

SEQ ID NO: 27 - DNA, 771 bp, Homo sapiens
  modified_base (663)..(758): n = a, c, g or t/u
gcggccgccctttttttttttttttttcttccaaaattacatttatttttctcaattcagaaaagtctcaacaccacaatttatctgtttaatgttttcatttacatttggctttatcccaaaaagggtttaacagtgtcaccaagttaccaggtctctgtttcatcatatttacacaagatgaaggaaactcaatctgttcgtatttgccccaggtaataggttctatgtagtgacaggcatttcactatttgacttagtgtttgccaaaatgaagtaaggggaattgggtccagagctgaggacagatccatttggaatgaaagcataataaccttgaagttattccagtgacaaaaaatgatcagtgaaagattttctaagagcaagcaggaatgagaaggctggccctctggccagcatgagatggggtcttaggaacagttgtcattcagtaacctcctaacaaacactccgggcaagccacttcccctctctgagaatcatttcctcttcctgtacataaggggagagggtcagtcaaccatcttaagatatgggaacttaaggggactcatgggcctgcgggaaaaaagctcaaaatgtgttttttgcattgggcctgcatgggacgtaagtgtttccgggagtgaggggaagccntgggaaagggaactgctantgctaatggatgattaaagagatgactcntgtggggaaccaccactcaaacccttgcctggccggtacaaancnanttccaagcctcaa

SEQ ID NO: 28 - DNA, 1086 bp, Homo sapiens
ccccggcccacaagcccctgcagggagcgggcccgggcggcgcgcgatcgaggtcgggtcgccgtccagcctgcagcatgagcgcccccagcgcgacccccatcttcgcgcccggcgagaactgcagccccgcgtggggggcggcgcccgcggcctacgacgcagcggacacgcacctgcgcatcctgggcaagccggtgatggagcgctgggagaccccctatatgcacgcgctggccgccgccgcctcctccaaagggggccgggtcctggaggtgggctttggcatggccatcgcagcgtcaaaggtgcaggaggcgcccattgatgagcattggatcatcgagtgcaatgacggcgtcttccagcggctccgggactgggccccacggcagacacacaaggtcatccccttgaaaggcctgtgggaggatgtggcacccaccctgcctgacggtcactttgatgggatcctgtacgacacgtacccactctcggaggagacctggcacacacaccagttcaacttcatcaagaaccacgcctttcgcctgctgaagccggggggcgtcctcacctactgcaacctcacctcctggggggagctgatgaagtccaagtactcagacatcaccatcatgtttgaggagacgcaggtgcccgcgctgctggaggccggcttccggagggagaacatccgtacggaggtgatggcgctggtcccaccggccgactgccgctactacgccttcccacagatgatcacgcccctggtgaccaaaggctgagcccccaccccggcccggccacacccatgccctcctccgtgccttcctggccgggagtccagggtgtcgcaccagccctgggctgatcccagctgtgtgtcaccagaagctttcccggcttctctgtgaggggtcccaccagcccagggctgatcccagctgtgtgtcaccagcagctttcccagcttctctgtgagggtcactgctgcccactgcagggtccctgaggtgaagtaaacgccggcgctgggcttggccagtcggcagtgaaaaaaaaaaaaaaaaaaaaaaaaaaaaa

SEQ ID NO: 29 - DNA, 668 bp, Homo sapiens
  modified_base (567)..(646): n = a, c, g or t/u
accacctgactcagacttctttgtcgttgttttatttaaaatgttattgtctctgattagaaaatacagtcatgagggctaaaaactgaaatgatgtgaaaaggcatccattaagcagtgttgccccaccaccctttccatcagtcttgtctcatggggatggggaaaatgaagacagaacgctttgccttgctttgcaatccctcctttgaaggccttctgtcccaggaagccaatgttcatttgatgtggaagagggacctgtgtttaaccagaagctgtcctccctcatccctttcccatggcttacacgcagaagggagaggagatgaccagaggagaaatcaggggaagaaaaggcaacaggggaggcaaagggaaaggagaggaatgcttaaaatatacagtgaaatttgagtaggattctctactcaaagacttctctgggaagtgtccagaattgaccacacaggtgctgacggtagaaagaacacagacccaaaaccctgatctagttgcattaactccattagccctgagttccctgtaaaatgaagactgtggagnaccactagaggattctgtgacttctcaactctaaaatttggactngacctcgtncgatnttggctcgaggcaaattccnatatggtcgattaatcgaacca

SEQ ID NO: 30 - DNA, 6450 bp, Homo sapiens
gagttgtgcctggagtgatgtttaagccaatgtcagggcaaggcaacagtccctggccgtcctccagcacctttgtaatgcatatgagctcgggagaccagtacttaaagttggaggcccgggagcccaggagctggcggagggcgttcgtcctgggagctgcacttgctccgtcgggtcgccggcttcaccggaccgcaggctcccggggcagggccggggccagagctcgcgtgtcggcgggacatgcgctgcgtcgcctctaacctcgggctgtgctctttttccaggtggcccgccggtttctgagccttctgccctgcggggacacggtctgcaccctgcccgcggccacggaccatgaccatgaccctccacaccaaagcatctgggatggccctactgcatcagatccaagggaacgagctggagcccctgaaccgtccgcagctcaagatccccctggagcggcccctgggcgaggtgtacctggacagcagcaagcccgccgtgtacaactaccccgagggcgccgcctacgagttcaacgccgcggccgccgccaacgcgcaggtctacggtcagaccggcctcccctacggccccgggtctgaggctgcggcgttcggctccaacggcctggggggtttccccccactcaacagcgtgtctccgagcccgctgatgctactgcacccgccgccgcagctgtcgcctttcctgcagccccacggccagcaggtgccctactacctggagaacgagcccagcggctacacggtgcgcgaggccggcccgccggcattctacaggccaaattcagataatcgacgccagggtggcagagaaagattggccagtaccaatgacaagggaagtatggctatggaatctgccaaggagactcgctactgtgcagtgtgcaatgactatgcttcaggctaccattatggagtctggtcctgtgagggctgcaaggccttcttcaagagaagtattcaaggacataacgactatatgtgtccagccaccaaccagtgcaccattgataaaaacaggaggaagagctgccaggcctgccggctccgcaaatgctacgaagtgggaatgatgaaaggtgggatacgaaaagaccgaagaggagggagaatgttgaaacacaagcgccagagagatgatggggagggcaggggtgaagtggggtctgctggagacatgagagctgccaacctttggccaagcccgctcatgatcaaacgctctaagaagaacagcctggccttgtccctgacggccgaccagatggtcagtgccttgttggatgctgagccccccatactctattccgagtatgatcctaccagacccttcagtgaagcttcgatgatgggcttactgaccaacctggcagacagggagctggttcacatgatcaactgggcgaagagggtgccaggctttgtggatttgaccctccatgatcaggtccaccttctagaatgtgcctggctagagatcctgatgattggtctcgtctggcgctccatggagcacccagtgaagctactgtttgctcctaacttgctcttggacaggaaccagggaaaatgtgtagagggcatggtggagatcttcgacatgctgctggctacatcatctcggttccgcatgatgaatctgcagggagaggagtttgtgtgcctcaaatctattattttgcttaattctggagtgtacacatttctgtccagcaccctgaagtctctggaagagaaggaccatatccaccgagtcctggacaagatcacagacactttgatccacctgatggccaaggcaggcctgaccctgcagcagcagcaccagcggctggcccagctcctcctcatcctctcccacatcaggcacatgagtaacaaaggcatggagcatctgtacagcatgaagtgcaagaacgtggtgcccctctatgacctgctgctggagatgctggacgcccaccgcctacatgcgcccactagccgtggaggggcatccgtggaggagacggaccaaagccacttggccactgcgggctctacttcatcgcattccttgcaaaagtattacatcacgggggaggcagagggtttccctgccacagtctgagagctccctggctcccacacggttcagataatccctgctgcattttaccctcatcatgcaccactttagccaaattctgtctcctgcatacactccggcatgcatccaacaccaatggctttctagatgagtggccattcatttgcttgctcagttcttagtggcacatcttctgtcttctgttgggaacagccaaagggattccaaggctaaatctttgtaacagctctctttcccccttgctatgttactaagcgtgaggattcccgtagctcttcacagctgaactcagtctatgggttggggctcagataactctgtgcatttaagctacttgtagagacccaggcctggagagtagacattttgcctctgataagcactttttaaatggctctaagaataagccacagcaaagaatttaaagtggctcctttaattggtgacttggagaaagctaggtcaagggtttattatagcaccctcttgtattcctatggcaatgcatccttttatgaaagtggtacaccttaaagcttttatatgactgtagcagagtatctggtgattgtcaattcacttccccctataggaatacaaggggccacacagggaaggcagatcccctagttggccaagacttattttaacttgatacactgcagattcagagtgtcctgaagctctgcctctggctttccggtcatgggttccagttaattcatgcctcccatggacctatggagagcaacaagttgatcttagttaagtctccctatatgagggataagttcctgatttttgtttttatttttgtgttacaaaagaaagccctccctccctgaacttgcagtaaggtcagcttcaggacctgttccagtgggcactgtacttggatcttcccggcgtgtgtgtgccttacacaggggtgaactgttcactgtggtgatgcatgatgagggtaaatggtagttgaaaggagcaggggccctggtgttgcatttagccctggggcatggagctgaacagtacttgtgcaggattgttgtggctactagagaacaagagggaaagtagggcagaaactggatacagttctgagcacagccagacttgctcaggtggccctgcacaggctgcagctacctaggaacattccttgcagaccccgcattgcctttgggggtgccctgggatccctggggtagtccagctcttattcatttcccagcgtggccctggttggaagaagcagctgtcaagttgtagacagctgtgttcctacaattggcccagcaccctggggcacgggagaagggtggggaccgttgctgtcactactcaggctgactggggcctggtcagattacgtatgcccttggtggtttagagataatccaaaatcagggtttggtttggggaagaaaatcctcccccttcctcccccgccccgttccctaccgcctccactcctgccagctcatttccttcaatttcctttgacctataggctaaaaaagaaaggctcattccagccacagggcagccttccctgggcctttgcttctctagcacaattatgggttacttcctttttcttaacaaaaaagaatgtttgatttcctctgggtgaccttattgtctgtaattgaaaccctattgagaggtgatgtctgtgttagccaatgacccaggtagctgctcgggcttctcttggtatgtcttgtttggaaaagtggatttcattcatttctgattgtccagttaagtgatcaccaaaggactgagaatctgggagggcaaaaaaaaaaaaaaaagtttttatgtgcacttaaatttggggacaattttatgtatctgtgttaaggatatgcttaagaacataattcttttgttgctgtttgtttaagaagcaccttagtttgtttaagaagcaccttatatagtataatatatatttttttgaaattacattgcttgtttatcagacaattgaatgtagtaattctgttctggatttaatttgactgggttaacatgcaaaaaccaaggaaaaatatttagtttttttttttttttttgtatacttttcaagctaccttgtcatgtatacagtcatttatgcctaaagcctggtgattattcatttaaatgaagatcacatttcatatcaacttttgtatccacagtagacaaaatagcactaatccagatgcctattgttggatattgaatgacagacaatcttatgtagcaaagattatgcctgaaaaggaaaattattcagggcagctaattttgcttttaccaaaatatcagtagtaatatttttggacagtagctaatgggtcagtgggttctttttaatgtttatacttagattttcttttaaaaaaattaaaataaaacaaaaaaaatttctaggactagacgatgtaataccagctaaagccaaacaattatacagtggaaggttttacattattcatccaatgtgtttctattcatgttaagatactactacatttgaagtgggcagagaacatcagatgattgaaatgttcgcccaggggtctccagcaactttggaaatctctttgtatttttacttgaagtgccactaatggacagcagatattttctggctgatgttggtattgggtgtaggaacatgatttaaaaaaaaaactcttgcctctgctttcccccactctgaggcaagttaaaatgtaaaagatgtgatttatctggggggctcaggtatggtggggaagtggattcaggaatctggggaatggcaaatatattaagaagagtattgaaagtatttggaggaaaatggttaattctgggtgtgcaccaaggttcagtagagtccacttctgccctggagaccacaaatcaactagctccatttacagccatttctaaaatggcagcttcagttctagagaagaaagaacaacatcagcagtaaagtccatggaatagctagtggtctgtgtttcttttcgccattgcctagcttgccgtaatgattctataatgccatcatgcagcaattatgagaggctaggtcatccaaagagaagaccctatcaatgtaggttgcaaaatctaacccctaaggaagtgcagtctttgatttgatttccctagtaaccttgcagatatgtttaaccaagccatagcccatgccttttgagggctgaacaaataagggacttactgataatttacttttgatcacattaaggtgttctcaccttgaaatcttatacactgaaatggccattgatttaggccactggcttagagtactccttcccctgcatgacactgattacaaatactttcctattcatactttccaattatgagatggactgtgggtactgggagtgatcactaacaccatagtaatgtctaatattcacaggcagatctgcttggggaagctagttatgtgaaaggcaaataaagtcatacagtagctcaaaaggcaaccataattctctttggtgcaagtcttgggagcgtgatctagattacactgcaccattcccaagttaatcccctgaaaacttactctcaactggagcaaatgaactttggtcccaaatatccatcttttcagtagcgttaattatgctctgtttccaactgcatttcctttccaattgaattaaagtgtggcctcgtttttagtcatttaaaattgttttctaagtaattgctgcctctattatggcacttcaattttgcactgtcttttgagattcaagaaaaatttctattcatttttttgcatccaattgtgcctgaacttttaaaatatgtaaatgctgccatgttccaaacccatcgtcagtgtgtgtgtttagagctgtgcaccctagaaacaacatacttgtcccatgagcaggtgcctgagacacagacccctttgcattcacagagaggtcattggttatagagacttgaattaataagtgacattatgccagtttctgttctctcacaggtgataaacaatgctttttgtgcactacatactcttcagtgtagagctcttgttttatgggaaaaggctcaaatgccaaattgtgtttgatggattaatatgcccttttgccgatgcatactattactgatgtgactcggttttgtcgcagctttgctttgtttaatgaaacacacttgtaaacctcttttgcactttgaaaaagaatccagcgggatgctcgagcacctgtaaacaattttctcaacctatttgatgttcaaataaagaattaaact

SEQ ID NO: 31 - DNA, 1878 bp, Homo sapiens
ggaaaaagcatgacatttagaagtagaagacttagcttcaaatccctactccttcacttactaattttgtgatttggaaatatccgcgcaagatgttgacgttgcagacttgggtagtgcaagccttgtttattttcctcaccactgaatctacaggtgaacttctagatccatgtggttatatcagtcctgaatctccagttgtacaacttcattctaatttcactgcagtttgtgtgctaaaggaaaaatgtatggattattttcatgtaaatgctaattacattgtctggaaaacaaaccattttactattcctaaggagcaatatactatcataaacagaacagcatccagtgtcacctttacagatatagcttcattaaatattcagctcacttgcaacattcttacattcggacagcttgaacagaatgtttatggaatcacaataatttcaggcttgcctccagaaaaacctaaaaatttgagttgcattgtgaacgaggggaagaaaatgaggtgtgagtgggatggtggaagggaaacacacttggagacaaacttcactttaaaatctgaatgggcaacacacaagtttgctgattgcaaagcaaaacgtgacacccccacctcatgcactgttgattattctactgtgtattttgtcaacattgaagtctgggtagaagcagagaatgcccttgggaaggttacatcagatcatatcaattttgatcctgtatataaagtgaagcccaatccgccacataatttatcagtgatcaactcagaggaactgtctagtatcttaaaattgacatggaccaacccaagtattaagagtgttataatactaaaatataacattcaatataggaccaaagatgcctcaacttggagccagattcctcctgaagacacagcatccacccgatcttcattcactgtccaagaccttaaaccttttacagaatatgtgtttaggattcgctgtatgaaggaagatggtaagggatactggagtgactggagtgaagaagcaagtgggatcacctatgaagataacattgcctccttttgaagccaatggaaaaatcttggattatgaagtgactctcacaagatggaaatcacatttacaaaattacacagttaatgccacaaaactgacagtaaatctcacaaatgatcgctatctagcaaccctaacagtaagaaatcttgttggcaaatcagatgcagctgttttaactatccctgcctgtgactttcaagctactcaccctgtaatggatcttaaagcattccccaaagataacatgctttgggtggaatggactactccaagggaatctgtaaagaaatatatacttgagtggtgtgtgttatcagataaagcaccctgtatcacagactggcaacaagaagatggtaccgtgcatcgcacctatttaagagggaacttagcagagagcaaatgctatttgataacagttactccagtatatgctgatggaccaggaagccctgaatccataaaggcataccttaaacaagctccaccttccaaaggacctactgttcggacaaaaaaagtagggaaaaacgaagctgtcttagagtgggaccaacttcctgttgatgttcagaatggatttatcagaaattatactatattttatagaaccatcattggaaatgaaactgctgtgaatgtggattcttcccacacagaatatacattgtcctctttgactagtgacacattgtacatggtacgaatggcagcatacacagatgaaggtgggaaggatggtccagaattcacttttactaccccaaagtttgctcaaggagaaattgaagccatagtcgtg

SEQ ID NO: 32 - DNA, 801 bp, Homo sapiens
  modified_base (132): n = a, c, g or t/u
tttgttttattgatayttttaaatctaaataaatatggaaccaatagcaaaacatttaaaaagtatgttggtaaaggwagttctacaagtttttcctgttgttaaaactatccgagtyttctgttgccacanacaggacaatgttttaatcaaactgtgactgtgttcatttcaggtttcctacatgaagaattgtcaatactacgcyccctcaactatattcaaccaaggatctgcgtgaaactttttctaaggkaccatctcaaatatattcaaccacggaactgcgtgtractttttctaagggaccatctcaaatcacaaggcctgggattgggaaattgttttactttactaaagaccactgtgactcaataaacgaacttagattagaaaattagaggcagaccactactcctctcggactgcatggccactgtcttcagctgttttctgtagtgattgtttcaaggtattttacctattttaccaacctttttcactttttgcactgaatagtgctaagggaaaaaaaggatggggaaaggaggagtggcagtttctatagcyagagggtcatcctatttgtggaaaactttattgtctactttagtgggtcctgaatattagtccagtccttactgcccagcacttaagggagagaggtctaatgtgactgtgtgggggttgaagtaggtaccaaaggaaaagcagttcccaccacctccaaggagcaggagcwgttgctcttcaggaagaaggatactagtatggttgtgtamattaatggccatggcacat

SEQ ID NO: 33 - DNA, 2216 bp, Homo sapiens
tttccgcagttaggggctgctatttcaacgcagggagataaaaagaaaaaaacacttgctcttctaccccgctaaaaacactcatcctagggagcacgccagcatttgcagcgttcggggcagggccactcggcctgcggccgttgcactggctggaagctggcaggcgatcacggttgattggctcgggtgcggtccaagggcagcaacgccttcggcgggccgcctagggtgattggctgctgcagcccaccccctagccggtttggtgggcggcgaagcctggattggtggagctaagagctggctcagtttcagcgctggctcttcgtgcatggcagagatggcgactgcgactcggctgctggggtggcgtgtggcgagctggaggctgcggccgccgcttgccggcttcgtttcccagcgggcccactcgcttttgcccgtggacgatgcaatcaatgggctaagcgaggagcagaggcagcttcgtcagaccatggctaagttccttcaggagcacctggcccccaaggcccaggagatcgatcgcagcaatgagttcaagaacctgcgagaattttggaagcagctggggaacctgggcgtattgggcatcacagcccctgttcagtatggcggctccggcctgggctacctggagcatgtgctggtgatggaggagatatcccgagcttccggagcagtggggctcagttacggtgcccactccaacctctgcatcaaccagcttgtacgcaatgggaatgaggcccagaaagagaagtatctcccgaagctgatcagtggtgagtacatcggagccctggccatgagtgagcccaatgcaggctctgatgttgtctctatgaagctcaaagcggaaaagaaaggaaatcactacatcctgaatggcaacaagttctggatcactaatggccctgatgctgacgtcctgattgtctatgccaagacagatctggctgctgtgccagcttctcggggcatcacagccttcattgtggagaagggtatgcctggctttagcacctctaagaagctggacaagctggggatgaggggctctaacacctgtgagctaatctttgaagactgcaagattcctgctgccaacatcctgggccatgagaataagggtgtctacgtgctgatgagtgggctggacctggagcggctggtgctggccggggggcctcttgggctcatgcaagcggtcctggaccacaccattccctacctgcacgtgagggaagcctttggccagaagatcggccacttccagttgatgcaggggaagatggctgacatgtacacccgcctcatggcgtgtcggcagtatgtctacaatgtcgccaaggcctgcgatgagggccattgcactgctaaggactgtgcaggtgtgattctttactcagctgagtgtgctacacaggtagccctggacggcattcagtgttttggtggcaatggctacatcaatgactttcccatgggccgctttcttcgagatgccaagctgtatgagataggggctgggaccagcgaggtgaggcggctggtcatcggcagagccttcaatgcagactttcactagtcctgagacccttcgcccccttttcctgcacctagtggcctttcttgggaagtagagatgtggcggctttcccaccctgcccacagcaggccctcctgcccagctgctcttgtcagccctctggcctctggatgaggttgagttctccacaacagctcccaagcatcatgggcctcgcagccgggcctgtgccacggctagtgttgtgtgatttaaaatggactcagcaggaagcatattgtctggggattgttgggacaggttttggtgactctgtgcccttgctctctaacttctgagcccacctcccagggtaggcacctgggggcatgcaggtgcccacctcccagggtaggcacctgggggcatgcaggtacccacctctttctcttgggtgaggctctggcaaggagatctctctgctcaagcacagcagaatcatggcccctctccatgaattggaacttggtacaggttaagtatccctaatcctgaaatctgaaacacttgtggttccaagcattttggataaggcaaattcaactttcagtctcttttctgggggaaaaaaataataaacctagcctagccaggcgtggtg

SEQ ID NO: 34 - DNA, 2146 bp, Homo sapiens
atgggttcagactttatgccctgaaaagatccttccagccctggccatcttggacttctggagctaccctggctcacaggggtcttgttgccctgggtgtccccagttcttgaaaagaatcagcctgggaggggccacaccctgaccatccccctttatcccttctgagatgtttgttaggaagtctgggtccaggggatatcatttcttgttccatccatgcaggggttgcttacctcgggtaggaaaccctcaggcggtggcaggtgcacaggtaggggaggatggagagggcagtggtgcctgaagccctggatgggcggagctgaccccccaacaccaactctctcatgcctgctcctccctgtccccccagagctgcctgatcattgctacagaatgaactctagcccagctgggaccccaagtccacagccctccagggccaatgggaacatcaacctggggccttcagccaacccaaatgcccagcccacggacttcgacttcctcaaagtcatcggcaaagggaactacgggaaggtcctactggccaagcgcaagtctgatggggcgttctatgcagtgaaggtactacagaaaaagtccatcttaaagaagaaagagcagagccacatcatggcagagcgcagtgtgcttctgaagaacgtgcggcaccccttcctcgtgggcctgcgctactccttccagacacctgagaagctctacttcgtgctcgactatgtcaacgggggagagctcttcttccacctgcagcgggagcgccggttcctggagccccgggccaggttctacgctgctgaggtggccagcgccattggctacctgcactccctcaacatcatttacagggatctgaaaccagagaacattctcttggactgccagggacacgtggtgctgacggattttggcctctgcaaggaaggtgtagagcctgaagacaccacatccacattctgtggtacccctgagtacttggcacctgaagtgcttcggaaagagccttatgatcgagcagtggactggtggtgcttgggggcagtcctctacgagatgctccatggcctgccgcccttctacagccaagatgtatcccagatgtatgagaacattctgcaccagccgctacagatccccggaggccggacagtggccgcctgtgacctcctgcaaagccttctccacaaggaccagaggcagcggctgggctccaaagcagactttcttgagattaagaaccatgtattcttcagccccataaactgggatgacctgtaccacaagaggctaactccacccttcaacccaaatgtgacaggacctgctgacttgaagcattttgacccagagttcacccaggaagctgtgtccaagtccattggctgtacccctgacactgtggccagcagctctggggcctcaagtgcattcctgggattttcttatgcgccagaggatgatgacatcttggattgctagaagagaaggacctgtgaaactactgaggccagctggtattagtaaggaattaccttcagctgctaggaagagcgactcaaactaacaatggcttcaacgagaagcaggtttattttttccagcacataaaagaaaaataatgtttcggagtccaggactggcaggacaggtcatcagatactcagaggctgtatctctgccctgccaaccttgacaaatggcttccaatgttaggtttgctacaagatggttactggagctctagctgcctattttgtgtttagggaagggaaaatggaggaaaggggagaagagcaaagggcgcttttaaagagctttcccaaaagctccacccaatgacttctgcttccatctcactaaccacccacccctacctggaatggaggctgggagatgtggcttatttgctgggtacgtgactatccctaataacaaaggggttctgacactaagacattaggggagaatgttgggtaggcagccagcactcttttaccagagggcctcctggtgtttggattttgatctcaatgtgtaaaatgacagagatgtaacaagctcatagggtatcaatatctcttattgttctatgttgaaaaaaaaaaaaaaaaaaaaaaaaaaa

SEQ ID NO: 35 - DNA, 1819 bp, Homo sapiens
tattcaataaggactgttatttctagtatagagaggagggctcctaggcctggctaagcagtttaagataaaatgcaaaatgacccaattcaggatgattatagttggtttaaatttggttgctgaggcacaaacaaaagtgttggattctgtagtttttgttgtgattacagaacacatgcagtatcttccagaaccctttgataaagctgaagtaaggatgggctcacatggcccatgtgagtaagaagctgtgttgacagagtggacgataccttcaattatggcttaacaaaaaatgcctgaaaatggaataacttagaaggaactcttcctttaaaggatttaatggcaggtgcagtggcttacgcctgtaatcccagcactttgggagcctgaggcagaagatggcttgagcccaggagtttgaggcagcggtgagccataatcataccactgcacttaagcctgggcaacacaatgagaccctgtctcctgtctttaaaaaaaagagacagagacctacctgtatgctaggagcatccttctcactgtaggtcggatgtggtggttctgttttaaatttgctgaattgtgactttttttctttttcttttttttttttttttttttgtttttttttgaggcagggtctcactctgtcgcccaggctggagtgcagtggtgtgatctcggctcacttcaacctccacctcctgggttcaagcgattctcctgcctcagcctcctgagtagctgggattacaggcgtgcaccaccatgcctggctaatttttgtatttttagtagagatggggtttcacaatgttgcccaggttggtctcgaaccgctgaccttaagcgatccgcctgccttggcctccccaaggtgctggaattacaggcatgagccaccgcgcccggctgactttttttttttctttctttctttttgagacagagttttgctcagtctcccaggctggagtgcaatggcaacaacatggctcgctgcagcctcaatctgctgtgctcaggtattcctcctgcctcagcctcctgagtagctgggactacaggcgcatgccaccacacctggctattgtggattttaagaaattttttttgtagagacagggtcttactatgttgcccaggttgttcttgaactcttgggctccagagagcctcccatctcagcctcccaaagtgctgagattataggcgtgagccaccacacttagcctattgtgactttttagagtctctaatactttcttttagggcactaaaaacttaatcttagatccagttggtattcatttgggtgaatgaagtggtagggacctaccttaattttttttccaggtttttgtgattgaataagttccagatactcaaagcgacctagatcagtgatgaaatttttgactgcatttggacctatttctgggatctccttttactgatttctctgtatattcatgagcaaccttaaattattttagactatttaattattatgttctattttctggaaagttttgtccttcactcttctttttcaaaattttcctgattgttatttcataaatattttttcacagaatcaactggttttgaacctcaatttacttataggttaatttagagagaattgacttttaaaattatattaaaggccaggcatggtagctcatgcttataatcctggcattttggggggctgaggcagatggatcacatgatcccaggatttgagactggcctgggcaacatagtgagatctcatctcttaaaaaaaaaaaaaaaaaaaaaa

SEQ ID NO: 36 - DNA, 1816 bp, Homo sapiens
ggcacgagggtccacgtgtcttcctagtaggaacttcttcctcttcagcccgctgagtagctggcactttaaggcaggtgccaacgcaccggcagcaagcttccttttttgcccgggaaaaactgaggtgcaggtagtataagccattgatcacggaacgcacaggagcagagctcgagtccaagcatcgtggctccacccgtcatgctggatgcatctttaggctccgctctaggtatgtgtatcctttacgggatcagccaccggcagttgccttgcgagcacgatgacaaacctctgccggctcttttgggtctcatccctgtatctatacgttgcatcccaacataaagaccggaatgttcctttcgctgacccagtctctcaccctttccaaactccagaaatcttgtctgtcctcggaagaactccccctgcttctttctctaaaggctgtcttcaggccgggcacagtgggaggatcgcttgagcccagaaggccgcagtgaggtgagatcgcgccattgcactgcagcccccggcggcagagccggagccccgtctcgaaacaaacaaacaaaaaccaaccaaccaaccaacaaacaaacacagacaaagaaagaaagagcccaggcaacctagtgaaaacctgttcgggctggggcgtacctgtaccccagctgttccggaggctgaggccaggaggatgggtggacgctgggaggtggatgctgcagtgagcagtgattgcaccactgcactccagcctgggtgacagagccagaccccgtcccaaataaataaacataaaaataaaggaaccagtttgtagaaagcgggagagggtcccattgaacttcaagccttcgagcaacagctgtggctggacaggttggaccagcaggctggagcagtcgccatcttggcagggatcattgaccctgatctattcgtcgagaggaggaagagctgatcttacgcagggagggcaggtggactatgtgtggactctggtgacctgtttgggtgccaggtgttactcccagggccacccgtaactgtgaatgtgcaggaaccctgacttgagaagggcctggccacggggggcttaggcccctggggaatgagagtttggttcccggtacccagggaaaccaccagcatcggcagaggtgatagctgaggaggagcggggatttggacgagagacacaggatgagtaccggggggcagccccgtgatcaacaactgctgcaagaggggccgtttgttcgactcgctagtcttctgcggctctatgcggtactaaagagcagaagacagaacatacaaaaaccacaaaaagtagccgggcgtggtgctgcccgtcaataatcccagctactcgggaggctgagacaggagaatcgcttgaacccgggaggcggaagtttcagcgagccgagatcacgccgttgcagtccaacctgagcgtccgagcgagactctatctcagaaaataaagacagaatgaaagagcccggcgcggtggcttacgcctgtaatcccagcgctttgggaggccgaggcgggcggatcgcctgaggtcaggagctcgagaccagcctggccgacatggcgaaaccccctaaaaatacaaaaattagccgggcgtggtggcctgcgcctgtaatcccagctacccaggaggctgaggcaggagaatcgctggaacccgggaggtagaggctgcagtgagccgagatcgcgccactgcactccagcctgggcgacagagcgagagtttgtctgaaaaaaaaaaaaaaaaaaaaaaaaa

SEQ ID NO: 37 - DNA, 2091 bp, Homo sapiens
tgctgcgcaccgggcctcgcgccccgcgccccgcgccccgcgccccgcgccccgcaccggcctccaggatcatgtggtatgtcagcaccaggggcgtagccccacgggtcaactttgagggggccctcttctctggctatgcacctgacgggggcctctttatgcctgaagagctcccacagttggacagagagaccctgtgccagtggagcacactctcctatcctggcctggtgaaggagctgtgtgccctcttcattggctctgagctccttccaaaagatgaattaaatgatctgatcgaccgagccttcagcagattccgtcacagagaagtggtccatctgtccaggttgaggaatgggctgaacgtgttggagctgtggcatggcgtcacatatgcatttaaggacctgtccctgtcctgcacaacacagttcctgcagtacttcctggagaagagggagaagcacgtcactgtggttgtaggaacatctggggacacaggaagtgctgccattgagagtgttcaaggggcaaagaacatggacattatcgttctgctgcccaaaggtcactgcacaaagattcaggagctccagatgacaacggtgctgaagcagaacgtacatgtgtttggagtggagggaaacagcgatgagctcgatgagccgatcaagactgtgtttgccgatgtggcttttgtcaagaagcacaatctgatgagcctgaattcgatcaactggtcccgggtcctggtgcagatggcccatcacttctttgcttacttccagtgtacgccatccttggacacacatcccctacccctggtggaggtggttgtgccaacaggggctgccggtaaccttgcagctgggtacattgctcaaaagataggcctgcccatccgtctggtcgtggcagtgaaccgcaatgacatcatccacaggactgtccagcagggagacttctctctctctgaggctgttaaatcaaccttggcatcagctatggacattcaggtgccctacaacatggagggggtgttctggctgctctctggctctgacagccaggtgacaagagccctcatggagcagtttgaaaggacccaaagtgtgaatctgcccaaggaactgcacagcaagtgggagagacaggactacgaaaaaatggctgtaatggagtgtgatgggtgctgtgtggaactgtgccttggaaactgtgggcccagaagagggagcgtgacagatatcccagggacagccatggtcagaggtggtggctgagctggcctccaaccaggaggagcagtttgccagcactccccggtgctgcctcgcccctgcctctgcagccaagttcccggaagctgtcctggctgctggcctgacccctgagactcccgcggagatcgtagccctggagcacaaggagacacgctgcaccctgatgcggagaggtgacaactggatgctgatgcttcgggacaccattgaggaccttagccgacagtggaggagtcatgccctcaacacctcccagtagcctggctggaggtggctttctttaggcttcagatcccaggaagatgcaccttctgagctgccttgtgcaccctccccattaagcgtaggttaggaggtttccgggaggctgctcagctggatctggagccagctggctttgctccgttccctggctagtctgtgcctggtcaccagggaggctgagtgaggggctgtgaacagttgccggaagcaccccctccctccccggcccgtgcagcagtgtctgagctgtagtgaaagtttcagggcctgcaaaagaagaggcttgggcacaggactgaccatggctccaggggtttaggacccccagacctgtgaaggtgggagcagctcaccaccttcacgcaggctttgtatgttctctgagccttagttgattttggcccccaaaccaaatccaaaggttctggcccaccttgtcagaggcttccaccctgctcacatgttgggaatccctggaataaaatgcttgttcagtgaaaaaaaaaaaaaaaaaaaaaaaaaaaaaaaaaaaaaaaaa

SEQ ID NO: 38 - DNA, 5556 bp, Homo sapiens
gtcgtgctctcctcggtaggggaggaattggttaggcggcggcggcggcgaagcggcggcggcggctgtaggggagcagcggcagtggcggcgacggcgaggaggtgttcggtttgcgcagcgtagaaacgcccgcagcttcagagaaggagttcttgtgggaccaaattaggcattctgaacccacgccggcttagctgggccgagtccaggcgctgccgcacgtacagttttggtggcggtgacagacactgttcttgactctaggggcctattaggccgacgtctgaggcgcagatcgctggctctcgacgcattactctttacgccttacatttctgtcttccttcctgggtcagtgattcccggaccctggaagagaagagggtggctaatgattaaggctttccttaaagtttcccatgtctcaatggactcctgaatataacgagctctacaccttaaaagtggatatgaagagtgagattccttctgatgcaccaaagacacaggagagtctgaaagggatccttttgcatccagagcccattggggcagccaaaagttttcctgcaggagttgagatgattaatagtaaagtggggaatgaattctctcacctgtgtgatgattctcaaaagcaagagaaggaaatgaatggtaaccagcaagaacaagaaaaaagtctcgttgtgaggaaaaaacgcaaaagccagcaggctggcccttcgtatgtgcagaattgtgttaaagaaaaccagggaatattaggactgaggcaacacctagggacaccaagtgatgaagataatgattcctcttttagtgattgtctttcttctccttcatctagtctgcattttggagattctgatactgtgacttcagatgaggataaagaagtctctgtaagacattcccagaccattttgaatgctaaaagtagaagccatagtgcacggtctcataagtggcctcggactgagacagaatctgtatcgggattgttaatgaaaagaccctgtttacatggcagttcgttacggagacttccatgcagaaagagatttgtaaaaaataattcctcacagaggacacagaaacaaaaagagaggatattaatgcagaggaagaaacgagaagtgttagctcgaagaaaatatgccttgctacctagttctagtagttccagtgagaatgacctcagcagtgaatcctcttctagctcatcaactgaaggagaagaagatttgtttgtttctgccagtgaaaaccaccaaaacaatccagctgttccctcaggaagtattgatgaagatgttgtggtgatagaagcttcctccactccccaggttactgccaatgaagaaattaatgttacctcaactgacagtgaagtggagattgtaacagttggagaaagctatcggtctcgttcaacccttggacactccagatctcattggagccagggttccagttctcatgcaagtcggccacaggagccacggaaccgcagtaggatttctactgttatacagcccttgaggcagaatgcagcagaagttgtggaccttaccgttgatgaagatgaacctactgtagtaccaaccacttctgcaagaatggaatcacaagctactagcgcttccattaacaattcaaatccatctacctctgagcaggcctctgatactgcttcagctgtcaccagtagccaaccttccacagtgtcagagacttcagctactcttacaagcaatagtaccactggcacttctataggagatgactcaaggagaactacatctagtgctgtaacggaaactggccctcctgcaatgccaaggttaccttcctgctgtccccagcactcaccatgtggagggtcgtcacagaaccaccatgcattaggacatcctcatacaagttgctttcagcagcatggtcaccattttcaacatcatcaccaccaccaccatactccccacccagctgtcccagtttctccttcctttagtgatcctgcttgccctgtggaaagacctccacaagtacaagcaccttgtggagcaaatagtagttctggtaccagctatcatgaacagcaggcattgccagtggacctgagcaacagtggtatcagaagtcatggaagtggcagttttcatggagcatctgcatttgacccctgctgccctgtttcttcctcccgagctgcaatctttggccatcaggccgctgctgctgccccaagtcaacctttatcatcaatagatggctatggatcaagcatggttgcgcagccccagccccagccccctccacagccctctctctcatcatgtcgacattacatgccacccccttatgcctctttgacaaggccacttcatcatcaagcttctgcctgcccgcattctcatggaaacccccctcctcagactcagcctccgcctcaagtggattatgttattcctcatcctgtacatgctttccattctcaaatatcttctcatgcaacatctcatcctgtggcacccccaccaccaactcacttagccagtacagctgcaccaatccctcagcatcttcctcctacacaccagccaatttcgcaccatattccagccacagcacctccagcacagagactgcatcctcatgaagtgatgcagaggatggaagttcaaaggaggaggatgatgcagcatccaacgcgggcacatgaacgccccccaccccatccacataggatgcacccaaactatggtcatgggcatcatattcatgtgcctcagactatgtcctcacatcctcgacaggctccagagaggtctgcctgggaactgggaattgaagctggagtgactgcagctacttatacacctggtgcattgcatcctcacttggcccattatcacgcacctcctcgacttcatcacttacaattaggagctcttcctttaatggttcctgatatggcaggctatcctcacatccgttacatttcatcaggattggatggaacatcattcagaggtcctttcaggggcaattttgaggaactgattcatttggaagaaagattaggcaatgtcaatcgtggagcatcccaggggacaattgaaagatgtacatatccacataaatacaaaaagaggaaactgcactgcaaacaagatggggaagaagggactgaggaagacacagaggaaaaatgtactatctgtttgtctattttagaggaaggtgaagatgtgagacgtcttccatgtatgcaccttttccaccaagtgtgtgttgaccaatggttgattaccaataagaagtgccccatatgcagagtggacattgaggcccagctgccaagtgaaagttgacaccatgtttcagaactcttgccctccctctcattcccatccttcctggtactgcagtcaaccaaagatggcatgacttacctgcgcagatttggaagcattgaacttagagtgctggctctgctatatggtacaactaatgctagacctacagtttatgtatacagttgattttgatgtatttataaaagcttttttttctagatttgacatttttctgtatcattttactgtatttttgcatggttccttgtattgcatttctttgcacatattatgggcttgtgaccctaaacttgcaggcaaggttagctgctttagtaagtagaattttgtggtctttttgttttttacatagtaccaagccttgataattatgaattttttatccattactaacctttaatttaatcaatcatgtactttagtttaatgtataaagatcctctagaaaatgataatattgtgtattaagacattccttaattaggacaaaatggctgctgtatatttactatatggagttctgagttaaataccatccttaatactgggaacagaatacaacccatataaatcagatgcaggtggtagtcacatcaccagagtgatcagtataaattttcttggtgtatccttttcctttcaacacagtgcagataagagttgaatattgatatcatacatttagactgctgttctgattgcatttatctttttcctacatcatttagaattttatttccctgattcagtttttgctgctgtgaaacagctctgatgaacactaaatattaatttcaattagctagattgtacatacttgcagatttaacaaaattttagggaaattgaaaaagacatgtagaatttgttgtcttctgctaagcacgaaaagttaagatatctgcttacattgattttgtagacacattaagtcaagatttggaatttaagtcactggcaggtatctgtgcattcatagaacttataaaggtcccaggatcacttttaagggatttttattagtttaaaggtaaataaagtcagctgaatctacatgtctcttgttttatttctctctaaacttgaaaacagtaaatctgcagatactgtgaggcacaaattatactgtcaacctactgttgctatggttatatactcccacttcatacattaccaagagtcgatcactgatttaaaatttttaatttctatagttaagatttactgcataatatagaatataaagttaagttaacatactaacatttctcctttggaggaagttttaatctacttcaggatgcatattattatcaagatactttcatatacaggatagcctaattttatttgtttaaatatgcttaatatgccccagattgcaaatgcatccagtcagtaatatcactgtctgtatgtggaggacatgttcccatggatcatatgtgaagatgtcaataagcttgcattaagccacctgctttgtaagtggattgattaataaataacttatatttctattgtctttgtgtttcataattagtttttataaaaacagtttacattaaacatcttggaattcaacaatagtgatctcactcaaattgacatttgcataatttgacatttatattcattcagttatgactacttgcccttttcttcatattagtaaatgttacactgtagtagttgtcaatgttaacaggcttcaacatagtatgtgtgcagatggacgatggatttaaagagcataccttatgattaaaccgaggttatagaaggtcaggggagagtgaaggagtcagtgacctatgtctgccatcttactggggaaaagagcaagtagcctgtcttcctttaagtaagtagcctgtaatggatgtactactttgccactggaataccccgggtctgtgccaagggactgaagaagtgtaagatggggagaactgtatgtcatggagtcctcttgacgttcccccagatacaagtaaagcacaggtggatttctctatttttgaatactacatcagatttagatgcacgactacctgttgacttgttttataattgctactgatttttttaatgtaggcaaagctttgttactttgaaatttatttaataaaagtatttgtgacataaaaaaaaaaaaaaaaaaaaa

SEQ ID NO: 39 - DNA, 2155 bp, Homo sapiens
caactgtaatttgaaataaggaaaactttaattttcagtataaaaattgctcaaatagaattgcctgattttaatgacaaaaggtaacagactgggttgacccatcatttgatgattttctagagtgtagtggcgtctctactattactgccacatcattaggtgtgaataactcaagtcatagaagaaaaaatgggccttctacattagaaagcagcagatttccagcgagaaaaagaggaaatctatcttccttagaacagatttatggtttagaaaattcaaaagaatatctgtctgaaaatgaaccatgggtggataaatataaaccagaaactcagcatgaacttgctgtgcataaaaagaaaattgaagaagtcgaaacctggttaaaagctcaagttttagaaaggcaaccaaaacagggtggatctattttattaataacaggtcctcctggatgtggaaagacaacgaccttaaaaatactatcaaaggagcatggtattcaagtacaagagtggattaatccagttttaccagacttccaaaaagatgatttcaaggggatgtttaatactgaatcaagcttccatatgtttccctatcagtctcagatagcagttttcaaagagtttctactaagagcgacaaagtataacaagttacaaatgcttggagatgatctgagaactgataagaagataattctggttgaagatttacctaaccagttttatcgggattctcatactttacatgaagttctaaggaagtatgtgaggattggtcgatgtcctcttatatttataatctcggacagtctcagtggagataataatcaaaggttattgtttcccaaagaaattcaggaagagtgttctatctcaaatattagtttcaaccctgtggcaccaacaattatgatgaaatttcttaatcgaatagtgactatagaagctaacaagaatggaggaaaaattactgtccctgacaaaacttctctagagttgctctgtcagggatgttctggtgatatcagaagtgcaataaacagcctccagttttcttcttcaaaaggagaaaacaacttacggccaaggaaaaaaggaatgtctttaaaatcagatgctgtgctgtcaaaatcaaaacgaagaaaaaaacctgatagggtttttgaaaatcaagaggtccaagctattggtggcaaagatgtttctctgtttctcttcagagctttggggaaaattctatattgtaaaagagcatctttaacagaattagactcacctcggttgccctctcatttatcagaatatgaacgggatacattacttgttgaacctgaggaggtagtagaaatgtcacacatgcctggagacttatttaatttatatcttcaccaaaactacatagatttcttcatggaaattgatgatattgtgagagccagtgaatttctgagttttgcagatatcctcagtggtgactggaatacacgctctttactcagggaatatagcacatctatagctacgagaggtgtgatgcattccaacaaagcccgaggatatgctcattgccaaggaggaggatcaagttttcgacccttgcacaaacctcagtggtttctaataaataaaaagtatcgggaaaattgcctggcagcaaaagcactttttcctgacttctgcctaccagctttatgcctccaaactcagctattgccataccttgctctactaaccattccaatgagaaatcaagctcagatttcttttatccaagatattggaaggctccctctgaagcgacactttggaagattgaaaatggaagccctgactgacagggaacatggaatgatagaccctgacagcggagatgaagcccagcttaatggaggacattctgcagaggaatctctgggtgaacccactcaagccactgtgccggaaacctggtctcttcctttgagtcagaatagtgccagtgaactgcctgctagccagccccagcccttttcagcccaaggagacatggaagaaaacataataatagaagactacgagagtgatgggacatagaagccagcctgctaatcagattgctacttcacagcttcatttttgtttcattcagtggtacttcagca

SEQ ID NO: 40 - DNA, 1379 bp, Homo sapiens
agagaggaaggcgtggctccctcccgggccagtgagccctggcgccgccgcggccgcggtcccagcagcggagtagggcggcggctgcgccccgcaccatggggggcagcccagccccagccgcggtaaacgccgacctccgccgccgcccgcgccgcgtctgccccctcccgctgcggctctctggacgccatcccctcctcacctcgaagccaacatgaaggagacccggggctacggaggggatgcccccttctgcacccgcctcaaccactcctacacaggcatgtgggcgcccgagcgttccgccgaggcgcggggcaacctcacgcgccctccagggtctggcgaggattgcggatcggtgtccgtggccttcccgatcaccatgctgctcactggtttcgtgggcaacgcactggccatgctgctcgtgtcgcgcagctaccggcgccgggagagcaagcgcaagaagtccttcctgctgtgcatcggctggctggcgctcaccgacctggtcgggcagcttctcaccaccccggtcgtcatcgtcgtgtacctgtccaagcagcgttgggagcacatcgacccgtcggggcggctctgcacctttttcgggctgaccatgactgttttcgggctctcctcgttgttcatcgccagcgccatggccgtcgagcgggcgctggccatcagggcgccgcactggtatgcgagccacatgaagacgcgtgccacccgcgctgtgctgctcggcgtgtggctggccgtgctcgccttcgccctgctgccggtgctgggcgtgggccagtacaccgtccagtggcccgggacgtggtgcttcatcagcaccgggcgagggggcaacgggactagctcttcgcataactggggcaaccttttcttcgcctctgcctttgccttcctggggctcttggcgctgacagtcaccttttcctgcaacctggccaccattaaggccctggtgtcccgctgccgggccaaggccacggcatctcagtccagtgcccagtggggccgcatcacgaccgagacggccattcagcttatggggatcatgtgcgtgctgtcggtctgctggtctccgctcctgataatgatgttgaaaatgatcttcaatcagacatcagttgagcactgcaagacacacacggagaagcagaaagaatgcaacttcttcttaatagctgttcgcctggcttcactgaaccagatcttggatccttgggtttacctgctgttaagaaagatccttcttcgaaagttttgccaggaggaattttggggaaattaaaacctgcctttctgccaggatcacatcactggaagctccatgactctctttttgtaaaagaaaa

SEQ ID NO: 41 - DNA, 2092 bp, Homo sapiens
gaattccaaaattgtgatgtttcttgtatttttgatgaaggagaaatactgtaatgatcactgtttacactatgtacactttaggccagccctttgtagcgttatacaaactgaaagcacaccggacccgcaggctcccggggcagggccggggccagagctcgcgtgtcggcgggacatgcgctgcgtcgcctctaacctcgggctgtgctctttttccaggtggcccgccggtttctgagccttctgccctgcggggacacggtctgcaccctgcccgcggccacggaccatgaccatgaccctccacaccaaagcatctgggatggccctactgcatcagatccaagggaacgagctggagcccctgaaccgtccgcagctcaagatccccctggagcggcccctgggcgaggtgtacctggacagcagcaagcccgccgtgtacaactaccccgagggcgccgcctacgagttcaacgccgcggccgccgccaacgcgcaggtctacggtcagaccggcctcccctacggccccgggtctgaggctgcggcgttcggctccaacggcctggggggtttccccccactcaacagcgtgtctccgagcccgctgatgctactgcacccgccgccgcagctgtcgcctttcctgcagccccacggccagcaggtgccctactacctggagaacgagcccagcggctacacggtgcgcgaggccggcccgccggcattctacaggccaaattcagataatcgacgccagggtggcagagaaagattggccagtaccaatgacaagggaagtatggctatggaatctgccaaggagactcgctactgtgcagtgtgcaatgactatgcttcaggctaccattatggagtctggtcctgtgagggctgcaaggccttcttcaagagaagtattcaaggacataacgactatatgtgtccagccaccaaccagtgcaccattgataaaaacaggaggaagagctgccaggcctgccggctccgcaaatgctacgaagtgggaatgatgaaaggtgggatacgaaaagaccgaagaggagggagaatgttgaaacacaagcgccagagagatgatggggagggcaggggtgaagtggggtctgctggagacatgagagctgccaacctttggccaagcccgctcatgatcaaacgctctaagaagaacagcctggccttgtccctgacggccgaccagatggtcagtgccttgttggatgctgagccccccatactctattccgagtatgatcctaccagacccttcagtgaagcttcgatgatgggcttactgaccaacctggcagacagggagctggttcacatgatcaactgggcgaagagggtgccaggctttgtggatttgaccctccatgatcaggtccaccttctagaatgtgcctggctagagatcctgatgattggtctcgtctggcgctccatggagcacccagtgaagctactgtttgctcctaacttgctcttggacaggaaccagggaaaatgtgtagagggcatggtggagatcttcgacatgctgctggctacatcatctcggttccgcatgatgaatctgcagggagaggagtttgtgtgcctcaaatctattattttgcttaattctggagtgtacacatttctgtccagcaccctgaagtctctggaagagaaggaccatatccaccgagtcctggacaagatcacagacactttgatccacctgatggccaaggcaggcctgaccctgcagcagcagcaccagcggctggcccagctcctcctcatcctctcccacatcaggcacatgagtaacaaaggcatggagcatctgtacagcatgaagtgcaagaacgtggtgcccctctatgacctgctgctggagatgctggacgcccaccgcctacatgcgcccactagccgtggaggggcatccgtggaggagacggaccaaagccacttggccactgcgggctctacttcatcgcattccttgcaaaagtattacatcacgggggaggcagagggtttccctgccacagtctgagagctccctggc

SEQ ID NO: 42 - DNA, 4768 bp, Homo sapiens
atccttgccgcccgccccggcccagccgcgtcccggagccgtcgggcatggagccgtggaagcagtgcgcgcagtggctcatccattgcaaggtgctgcccaccaaccaccgggtgacctgggactcggctcaggtgttcgaccttgcgcagaccctccgcgatggagtcctgctctgccagctgcttaacaacctccgggcgcactccatcaacctgaaggagatcaacctgaggccgcagatgtcccagtttctctgtttgaagaacataaggacatttctcacggcctgttgtgagacgtttggaatgaggaaaagtgaacttttcgaggcatttgacttgtttgatgttcgtgactttggaaaggttatagaaacattatcacgactttctcgaacacctatagcattggccacaggaatcaggcccttcccaacagaagaaagcattaatgatgaagacatctacaaaggccttcctgatttaatagatgaaacccttgtggaagatgaagaagatctctatgactgtgtttatggggaagatgaaggtggagaagtctatgaggacttaatgaaggcagaggaagcacatcagcccaaatgtccagaaaatgatatacgaagttgttgtctagcagaaattaagcagacagaagaaaaatatacagaaactttggagtcaatagaaaagtatttcatggcaccactaaaaagatttctgacagcagcagaatttgattcagtattcatcaacattcctgaacttgtaaaacttcatcggaacctaatgcaagagattcatgattccattgtaaataaaaatgaccagaacttgtaccaagtttttattaactacaaggaaagattggttatttacgggcagtactgcagtggagtggagtcagccatctctagtttagactacatttctaagtcaaaagaagatgtcaaactgaaattagaggaatgttccaaaagagcaaataatgggaaatttactcttcgagacttgcttgtggttcctatgcaacgtgttttaaagtaccaccttctcctccaggaactggtcaaacataccactgatccgactgagaaggcaaatctgaaactggctcttgatgccatgaaggacttggcacaatatgtgaatgaagtgaaaagagataatgagacccttcgtgaaattaaacagtttcagctatctatagagaatttgaaccaaccagttttgctttttggacgacctcagggagatggtgaaattcgaataaccactctagacaagcataccaaacaagaaaggcatatcttcttatttgatttggcagtgatcgtatgtaagagaaaaggtgataactatgaaatgaaggaaataatagatcttcagcagtacaagatagccaataatcctacaaccgataaagaaaacaaaaagtggtcttatggcttctacctcatccatacccaaggacaaaatgggttagaattttattgcaaaacaaaagatttaaagaagaaatggctagaacagtttgaaatggctttgtctaacataagaccagactatgcagactccaatttccacgacttcaagatgcataccttcactcgagtcacatcctgcaaagtctgccagatgctcctgaggggaacattttatcaaggctatttatgttttaagtgtggagcgagagcacacaaagaatgtttgggaagagtagacaattgtggcagagttaattctggtgaacaagggacactcaaactaccagagaaacggaccaatggactgcgaagaactcctaaacaggtggatccaggtttaccaaagatgcaggtcattaggaactattctggaacaccacccccagctctgcatgaaggaccccctttacagctccaggccggggataccgttgaacttctgaaaggagatgcacacagtctgttttggcagggcagaaatttagcatctggagaggttggattttttccaagtgatgcagtcaagccttgcccatgtgtgcccaaaccagtagattattcttgccaaccctggtatgctggagcaatggaaagattgcaagcagagaccgaacttattaatagggtaaatagtacttaccttgtgaggcacaggaccaaagagtcaggagaatatgcaattagcattaagtacaataatgaagcaaagcacatcaagattttaacaagagatggcttttttcacattgcagaaaatagaaaatttaaaagtttaatggaacttgtggagtactacaagcatcattctctcaaggaagggttcagaaccttagatacaactctgcagtttccatacaaggagccagaacattcagctggacagaggggtaatagagcaggcaacagcttgttaagtccaaaagtgctgggcattgccatcgctcggtatgacttctgtgcaagagatatgagagagttgtccttgttgaaaggagatgtggtgaagatttacacaaagatgagtgcaaatggctggtggagaggagaagtaaatggcagggtgggctggtttccatccacatatgtggaagaggatgaataaattcaaatcccgtgttgcaccctgcaccaaaaatttcagagaagggataaatagaagcctgcacagcatcgtgaattaactgaagtgtttaaaaagctgcatttctggctgttcaacatcctccctccttagcccctcctaagtcttaatgctgagatttctaaagatgctggtactgacagattaatggcttgcctagagctgtgcaagaaacagcctgccagtctgtcattgtcagggaccagggcaaaaccaagagctgttcttcccagaagagccctgcaaacacattggttcgtgcttccctttacttcttctggtcagataccatgaatgccagtcatcagtaaatcttaatacacttttgctttattctcacatgccattcaccagattatttgatggtacaaagaagcagaagtgtaattttccttttcccagcatgacgaaaaattggagttctgccatttgagcagcttactggaaagatccagccttacttgtcttaaattgtccaacaaggtgactcattgcccggcaaacacttttaccctcagatgttactcatgatattataaaatatgaggccagtgctcaggtttgcatcataagtgagctatccctgaagggttttaattacttatttggtgtcctgattatatttgcaaacttctttataaaaggtgaaaaaagcacacaaaagagagggtgtcttcatattaaaccttcacaaccttcatgatttcataggattattttggaaatatagcacttgactttatgaaaggatctgggctaggtatattaggggtagttgccaataacctgaagaagctggcattgtttacagaaacagatcaagggctataatttatgtcattttatagcagcagtatctattaatacatgccttttcctcccatccacctcccccgcacacacacaaagatgacctgggacatgatttttttattcccacattttcttggagcacaaacaactttgttgaggattttggaaggaaagcacaactgggtcctttattcatttctgggacagaaagagggtcagtggacttttgtgggcctccagcttctctcagagtctccccctctgcagcccatcctgggagtgtattaactggagggaagatgggtcttgcagtacatttgttttgcccagccatcactcttttttgtgaggagcctaaatacattcttcctggggtccagagtccccattcaaggcagtcaagttaagacactaacttggccctttcctgatggaaatatttcctccatagcagaagttgtgttctgacaagactgagagagttacatgttgggaaaaaaaagaagcattaacttagtagaactgaaccaggagcattaagttctgaaattttgaatcatctctgaaatgaagcaggtgtagcctgccctctcatcaatccgtctgggtgccagaactcaaggttcagtggacacatccccctgttagagaccctcatgggctaggacttttcatctaggatagattcaagacctttacctcagaattatgtaaactgtgattgtgttttagaaaaattattatttgctaaaaccatttaagtctttgtatatgtgtaaatgatcacaaaaatgtattttataaaatgttctgtacaataaagttacacctcaaagtgtactcttggaatggattctttcctgtaaagtcttatctgcgactctgtctcgggaatgttttgtctgttgccgtcagccgaactttgttatggagggagcagcctcacacaagcagaaacactcctgtggatggtattgtagcatgtattgtttattttagtcaatagaccctctccttataaatggtgtttagtcttcctgttgcatttcatgggcctgggggtttcctagcagaggatattggagcccctttttgtgacattaccaattacatctttgtccacgtttaatactttgttttggaaaatttaaatgctgcagatttgtgtagagttctaataccaaagacagaagtaaatgttttccatatactttgtcttgcctgtatgcagcccttgtgtaatatggtgaattagagtggtatttcactttgtattattttgtaaatatgtcaatataataaatagtgactaaaaaaaaaaaaaa

SEQ ID NO: 43 - DNA, 1684 bp, Homo sapiens
gctcagaaacgccaaaatctacgtggagagagctgtcaagcagaagaagatctttacaatccaaggctgctacccggtgatccggtgtctcttgcgccggaggggctgggtggagaagaagatggtccatcgctcaggccccaccctgctgccaccccagaaggatctggatagctcagcgatgggtgacagtgacaccactgaggatgaggatgaagatgaggacgaggagttccagccatcacagctgttcgacttcgatgatttactgaaatttgatgacctagatggaacacatgctctgatgcgaaggggcagaactcaggcacctcgacactcaggtccagcgctgtgaggacatcctgcagcagctgcaggccgtggtaccccagatagacatggaaggggatcgcaacttctggatcgtgaagccaggagccaagtcccgcggacgaggcatcatgtgcatggaccacctggaggagatgctgaagctggtgaacggcaaccccgtggtgatgaaggacggcaagtgggtggtgcagaagtatattgagcggcccctcctcatctttggcaccaagtttgacctcagacagtggttcctggtaactgactggaacccacttaccgtgtggttctaccgcgacagctatatccgcttttccacgcagcccttctccctgaagaacctggacaactcagtgcacctgtgcaacaactccatccagaagcacctggagaactcatgccatcggcatccactgcttccgccagacaacatgtggtctagccagaggttccaggcccacctgcaggagatgggtgccccaaatgcttggtccaccatcatcgtgcctggcatgaaggatgctgtgatccacgcacttcagacctcccaggacaccgtgcagtgtcggaaggccagctttgagctctatggcgctgacttcgtgttcggggaggacttccagccctggctgattgagatcaacgccagccccacgatggcaccctccacagcagtcactgcccggctctgtgctggcgtgcaagctgacaccctgcgcgtggtcattgaccggatgctggaccgcaactgtgacacaggagcctttgagctcatctataagcagcccgtcaccacttccccagcctccacaccaaggcccagctgccttctccccatgtactccgacaccagggccaggtcctcagacgacagcacagcaagctggtgggcactaaggccctgtcgaccacaggcaaggccttgaggactctacccacggctaaggtcttcatttccctcccaccgaaccttgatttcaaggtggcacccagcatcctgaagccaagaaaggctcctgctttcctgtgcctccgaggcccccagctggaagtgccttgttgcctctgccctttgaagtcggaacaattcctagcacctgtcggaaggtcaaggccaaaggcaaattcaaggccagactgtgacaaacccagggctgaggcctgccccatgaagaggctgagccccctgaaacccctgccccttgttggtacattccagaggcgcaggggcctgggggatatgaagctagggaagcccctgcttcgattccccactgcccttgtcctggatccaacaccaaataaaaagaaacaagtgaagtaaaaaaaaaaa

SEQ ID NO: 44 - DNA, 6812 bp, Homo sapiens
cggccgcgaccactaccaccactgagcaccgcttcttccgccggagcgtcatctgcgactccaatgccactgcactggagcttcccggccttcctctttccctgccccagcccagcatccccgcggctgtcccgcagagtgctccaccggagccccaccgggaagagaccgtgaccgccaccgccacttcccaggtagcccagcagcctccagccgctgccgcccctggggaacaggccgtcgcgggccctgccccctcgactgtccccagcagtaccagcaaagaccgcccagtgtcccagcctagccttgtggggagcaaagaggagccgccgccggcgagaagtggcagcggcggcggcagcgccaaggagccacaggaggaacggagccagcagcaggatgatatcgaagagctggagaccaaggccgtgggaatgtctaacgatggccgctttctcaagtttgacatcgaaatcggcagaggctcctttaagacggtctacaaaggtctggacactgaaaccaccgtggaagtcgcctggtgtgaactgcaggatcgaaaattaacaaagtctgagaggcagagatttaaagaagaagctgaaatgttaaaaggtcttcagcatcccaatattgttagattttatgattcctgggaatccacagtaaaaggaaagaagtgcattgttttggtgactgaacttatgacgtctggaacacttaaaacgtatctgaaaaggtttaaagtgatgaagatcaaagttctaagaagctggtgccgtcagatccttaaaggtcttcagtttcttcatactcgaactccacctatcattcaccgcgatcttaaatgtgacaacatctttatcaccggccctactggctcagtcaagattggagacctcggtctggcaaccctgaagcgggcttcttttgccaagagtgtgataggtaccccagagttcatggcccctgagatgtatgaggagaaatatgatgaatccgttgacgtttatgcttttgggatgtgcatgcttgagatggctacatctgaatatccttactcggagtgccaaaatgctgcgcagatctaccgtcgcgtgaccagtggggtgaagccagccagttttgacaaagtagcaattcctgaagtgaaggaaattattgaaggatgcatacgacaaaacaaagatgaaagatattccatcaaagaccttttgaaccatgccttcttccaagaggaaacaggagtacgggtagaattagcagaagaagatgatggagaaaaaatagccataaaattatggctacgtattgaagatattaagaaattaaagggaaaatacaaagataatgaagctattgagttttcttttgatttagagagagatgtcccagaagatgttgcacaagaaatggtagagtctgggtatgtctgtgaaggtgatcacaagaccatggctaaagctatcaaagacagagtatcattaattaagaggaaacgagagcagcggcagttggtacgggaggagcaagaaaaaaaaaagcaggaagagagcagtctcaaacagcaggtagaacaatccagtgcttcccagacaggaatcaagcagctcccttctgctagcaccggcatacctactgcttctaccacttcagcttcagtttctacacaagtagaacctgaagaacctgaggcagatcaacatcaacaactacagtaccagcaacccagtatatctgtgttatctgatgggacggttgacagtggtcagggatcctctgtcttcacagaatctcgagtgagcagccaacagacagtttcatatggttcccaacatgaacaggcacattctacaggcacagtcccagggcatataccttctactgtccaagcacagtctcagccccatggggtatatccaccctcaagtgtggcacaggggcagagccagggtcagccatcctcaagtagcttaacaggggtttcatcttcccaacccatacaacatcctcagcagcagggaatacagcagacagcccctcctcaacagacagtgcagtattcactttcacagacatcaacctccagtgaggccactactgcacagccagtgagtcaacctcaagctccacaagtcttgcctcaagtatcagctggaaaacagagtactcagggagtctctcaggttgctcctgcagagccagttgcagtagcacagccccaagctacccagccgaccactttggcttcctctgtagacagtgcacattcagatgttgcttcaggtatgagtgatggcaatgagaacgtcccatcttccagtggaaggcatgaaggaagaactacaaaacggcattaccgaaaatctgtaaggagtcgctctcgacatgaaaaaacttcacgcccaaaattaagaattttgaatgtttcaaataaaggagaccgagtagtagaatgtcaattagagactcataataggaaaatggttacattcaaatttgacctagatggtgacaaccccgaggagatagcaacaattatggtgaacaatgactttattctagcaatagagagagagtcgtttgtggatcaagtgcgagaaattattgaaaaagctgatgaaatgctcagtgaggatgtcagtgtggaaccagagggtgatcagggattggagagtctacaaggaaaggatgactatggcttttcaggttctcagaaattggaaggagagttcaaacaaccaattcctgcgtcttccatgccacagcaaataggcattcctaccagttctttaactcaagttgttcattctgcgggaaggcggtttatagtgagtcctgtgccagaaagccgattacgagaatcaaaagttttccccagtgaaataacagatacagttgctgcctctacagctcagagccctggaatgaacttgtctcactctgcatcatcccttagtctacaacaggccttttctgaacttagacgtgcccaaatgacagaaggacccaatacagcacctccaaactttagtcatacaggaccaacatttccagtagtacctcctttcttaagtagcattgctggagtcccaaccacagcagcagccacagcaccagtccctgcaacaagcagccctcctaatgacatttccacatcagtaattcagtctgaggttacagtgcccactgaagaggggattgctggagttgccaccagcacaggtgtggtaacttcaggtggtctccccataccacctgtgtctgaatcaccagtactttccagcgtagtttcaagtatcacaatacctgcagttgtctcaatatctactacatccccgtcacttcaagtccccacatccacatctgagatcgttgtttctagtacagcactgtatccttcagtaacagtttcagcaacttcagcctctgcagggggcagtactgctaccccaggtcctaagcctccagctgtagtatctcagcaggcagcaggcagcactactgtgggagccacattaacatcagtttctaccaccacttcattcccaagcacagcttcacagctgtccattcagcttagcagcagtacttctactcctactttagctgaaaccgtggtagttagcgcacactcactagataagacatctcatagcagtacaactggattggctttctccctctctgcaccatcttcctcttcctctcctggagcaggagtgtctagttatatttctcagcctggtgggctgcatcctttggtcattccatcagtgatagcttctactcctattcttccccaagcagcaggacctacttctacacctttattaccccaagtacctagtatcccacccttggtacagcctgttgccaatgtgcctgctgtacagcagacactaattcatagtcagcctcaaccagctttgcttcccaaccagccccatactcattgtcctgaagtagattctgatacacaacccaaagctcctggaattgatgacataaagactctagaagaaaagctgcggtctctgttcagtgaacacagctcatctggagctcagcatgcctctgtctcactggagacctcactagtcatagagagcactgtcacaccaggcatcccaactactgctgttgcaccaagcaaactcctgacttctaccacaagtacttgcttaccaccaaccaatttaccactaggaacagttgctttgccagttacaccagtggtcacacctgggcaagtttctaccccagtcagcactactacatcaggagtgaaacctggaactgctccctccaagccacctctaactaaggctccggtgctgccagtgggtactgaacttccagcaggtactctacccagcgagcagctgccaccttttccaggaccttctctaacccagtcccagcaacctctagaggatcttgatgctcaattgagaagaacacttagtccagagatgatcacagtgacttctgcggttggtcctgtgtccatggcggctccaacagcaatcacagaagcaggaacacagcctcagaaggtttctcaagtcaaagaaggccctgtcctagcaactagttcaggagctggtgtttttaagatgggacgatttcaggtttctgttgcagcagacggtgcccagaaagagggtaaaaataagtcagaagatgcaaagtctgttcattttgaatccagcacctcagagtcctcagtgctatcaagtagtagtccagagagtaccttggtgaaaccagagccgaatggcataaccatccctggtatctcttcagatgtgccagagagtgcccacaaaactactgcctcagaggcaaagtcagacactgggcagcctaccaaggttggacgttttcaggtgacaactacagcaaacaaagtgggtcgtttctctgtatcaaaaactgaggacaagatcactgacacaaagaaagaaggaccagtggcatctcctccttttatggatttggaacaagctgttcttcctgctgtgataccaaagaaagagaagcctgaactgtcagagccttcacatctaaatgggccgtcttctgacccggaggccgcttttttaagtagggatgtggatgatggttccggtagtccacactcgccccatcagctgagctcaaagagccttcctagccagaatctaagtcaaagccttagtaattcatttaactcctcttacatgagtagcgacaatgagtcagatatcgaagatgaagacttaaagttagagctgcgacgactacgagataaacatctcaaagagattcaggacctgcagagtcgccagaagcatgaaattgaatctttgtataccaaactgggcaaggtgccccctgctgttattattcccccagctgctcccctttcagggagaagacgacgacccactaaaagcaaaggcagcaaatctagtcgaagcagttccttggggaataaaagcccccagctttcaggtaacctgtctggtcagagtgcagcttcagtcttgcacccccagcagaccctccaccctcctggcaacatcccagagtccgggcagaatcagctgttacagccccttaagccatctccctccagtgacaacctctattcagccttcaccagtgatggtgccatttcagtaccaagcctttctgctccaggtcaaggaaccagcagcacaaacactgttggggcaacagtgaacagccaagccgcccaagctcagcctcctgccatgacgtccagcaggaagggcacattcacagatgacttgcacaagttggtagacaattgggcccgagatgccatgaatctctcaggcaggagaggaagcaaagggcacatgaattatgagggccctggaatggcaaggaagttctctgcacctgggcaactgtgcatctccatgacctcgaacctgggtggctctgcccccatctctgcagcatcagctacctctctaggtcacttcaccaagtctatgtgccccccacagcagtatggctttccagctaccccatttggcgctcaatggagtgggacgggtggcccagcaccacagccacttggccagttccaacctgtgggaactgcctccttgcagaatttcaacatcagcaatttgcagaaatccatcagcaaccccccaggctccaacctgcggaccacttagacctagagacattaactgaatagatctgggggcaggagatggaatgctgagggggtgggtgggggtgggaagtagcctatatactaactactagtgctgcatttaactggttatttcttgccagaggggaatgtttttaatactgcattgagccctcagaatggagagtctcccccgctccagttattggaatgggagaggaaggaaagaacagcttttttgtcaaggggcagcttcagaccatgctttcctgtttatctatactcagtaatgaggatgagggctaggaaagtcttgttcataaggaagctggagaactcaatgtaaaatcaaacccatctgtaatttcgagtgggtggagctcttgcttttggtacatgccctgaatccctcactccctcaagaatccgaaccacaggacaaaaaccacctactgggctctctcctaccctgccctcctcccttttttttacccctctcttttttattttttctttgctctttagaacccagtgaaaaataccagggtactggggtgcaactctttcttatgataggtcattagtgctttaagcaaaagatattagcagctttgactgcagcattagc

SEQ ID NO: 45 - DNA, 617 bp, Homo sapiens
tttttttttttttttttttggtcaagcaattttttccctttatttttgttaaataagattccagaaagtatagtgcaaacactcagtagaaaagttgcaattaagaaatgtacattcacatttaacatttcagtccattcactttttttaaaataaaaataggacaaattattcaattacttgtctcaatttaacaatcttgaaaaagactggaaggtaccctacagtgttcagttgacataaaaatagacccgtattgatcatacaaatctatcatgagaagttacccagtgagagtgagttattgtaattctgaatgtactcatcgtgtttctcacttctacagaagcatcctcagtgagttgtattgtgcgagaaaatgacacccttgcccacatcactctccattccatagagggacacaaccctatctagccaaacccagaagaacgcaggcgcttacacaacttttctcggacagtcgagaaaatccaaaagtgggctttgggcttaccttaaataggaatggaatgtaccactacgagatggtcatcataataaggacattgttgtttgagcggggggtgtgcaatcagtataaatgaggatggcggagg

SEQ ID NO: 46 - DNA, 536 bp, Homo sapiens
aacgtttgtttcatattttattgaatttcatttatattaaattaaaaatatatttctgacagattcatgtaacaaaaaggcagaacagttttcaaattgttcagctgggatgatcagtatggaatgaggcaaagcagttcgcattctataattgccttgtacaggtacaattctttcccaagagccaaaagaggatccttgagaactaacggaaaagcctaattacataaatgtaaaatactgtttctccctcattctcaaataacaacaggaatgagggaaaggaaggaggatgggtaaaaggttggaggagaagaaagaataagagaaagtatactaaaaatatgcctaacattaaaaaagttagtatgtgttaggtgcatgatccttcatcaataacatggaaaaaaatcaaaataacattacaccacacacaattggcatatcctattgtgtaagcgagtgcagaggttgaacacatcacaatagtgctgaacacagaatcacaagtaatgtcaaaatgataacttccaacc

SEQ ID NO: 47 - DNA, 1559 bp, Homo sapiens
gcggagcacagtccgccgagcacaagctccagcatcccgtcaggggttgcaggtgtgtgggaggcttgaaactgttacaatatggctttccttggactcttctctttgctggttctgcaaagtatggctacaggggccactttccctgaggaagccattgctgacttgtcagtgaatatgtataatcgtcttagagccactggtgaagatgaaaatattctcttctctccattgagtattgctcttgcaatgggaatgatggaacttggggcccaaggatctacccagaaagaaatccgccactcaatgggatatgacagcctaaaaaatggtgaagaattttctttcttgaaggagttttcaaacatggtaactgctaaagagagccaatatgtgatgaaaattgccaattccttgtttgtgcaaaatggatttcatgtcaatgaggagtttttgcaaatgatgaaaaaatattttaatgcagcagtaaatcatgtggacttcagtcaaaatgtagccgtggccaactacatcaataagtgggtggagaataacacaaacaatctggtgaaagatttggtatccccaagggattttgatgctgccacttatctggccctcattaatgctgtctatttcaaggggaactggaagtcgcagtttaggcctgaaaatactagaaccttttctttcactaaagatgatgaaagtgaagtccaaattccaatgatgtatcagcaaggagaattttattatggggaatttagtgatggctccaatgaagctggtggtatctaccaagtcctagaaataccatatgaaggagatgaaataagcatgatgctggtgctgtccagacaggaagttcctcttgctactctggagccattagtcaaagcacagctggttgaagaatgggcaaactctgtgaagaagcaaaaagtagaagtatacctgcccaggttcacagtggaacaggaaattgatttaaaagatgttttgaaggctcttggaataactgaaattttcatcaaagatgcaaatttgacaggcctctctgataataaggagatttttctttccaaagcaattcacaagtccttcctagaggttaatgaagaaggctcagaagctgctgctgtctcaggaatgattgcaattagtaggatggctgtgctgtatcctcaagttattgtcgaccatccatttttctttcttatcagaaacaggagaactggtacaattctattcatgggacgagtcatgcatcctgaaacaatgaacacaagtggacatgatttcgaagaactttaagttactttatttgaataacaaggaaaacagtaactaagcacattatgtttgcaactggtatatatttaggatttgtgttttacagtatatcttaagataatatttaaaatagttccagataaaaacaatatatgtaaattataagtaacttgtcaaggaatgttatcagtattaagctaatggtcctgttatgtcattgtgtttgtgtgctgttgtttaaaataaaagtacctattgaacatgtg

SEQ ID NO: 48 - DNA, 3282 bp, Homo sapiens
cggctgcgcactgggcgctctcgcccgagaagccgcagtctcgagagcgtcaacgaggtgtttcggtagtctctggccatcctttctgcgcacccggtgtcgctgggctgcaccccgggcggggacgtccgccgggcacgggagggggccaagatgccgatcaataaatcagagaagccagaaagctgcgataatgtgaaggttgttgttaggtgccggcccctcaatgagagagagaaatcaatgtgctacaaacaggctgtcagtgtggatgagatgaggggaactatcactgtacataagactgattcttccaatgaacctccaaagacatttacttttgatactgtttttggaccagagagtaaacaacttgatgtttataacttaactgcaagacctattattgattctgtacttgaaggctacaatgggactatttttgcatatggacaaaccggaacaggcaaaacttttaccatggaaggtgttcgagctattcctgaacttagaggaataattcccaattcatttgctcacatatttggtcatattgcaaaagcggagggtgatacaagatttttggttcgagtgtcttatttggaaatatataatgaagaagttcgtgaccttttgggcaaggatcagacacaaaggttagaggttaaagaaagacctgatgtgggagtttatatcaaagatttatcagcttatgtggtaaataatgctgatgatatggatagaattatgacgctaggccacaaaaatcgttctgttggtgcaactaatatgaacgaacatagttcccgttcccatgccatctttacaattactatagaatgcagtgaaaaaggcattgatggtaacatgcatgtcaggatggggaagctccatcttgtagatcttgctggttcagaaagacaggcaaaaactggagctactggacagcgcctaaaggaagctacaaaaatcaatctttcactttccacccttggtaatgtaatttctgccttggttgatggaaaaagcactcatgtgccttatcgtaactctaaactgactcgtcttcttcaggattccttaggaggaaattcaaaaaccatgatgtgtgcaaatattgggccagcagattacaattatgatgaaactatcagtacattacggtatgccaatcgtgctaagaatattaaaaataaagctagaattaatgaagatccaaaggatgctttgctgcgtcagttccagaaagaaatagaagaactgaaaaagaagcttgaagaaggagaagaaatatcaggctctgatatcagtgggtcagaggaagatgatgatgaagagggtgaggttggagaagatggagagaaaaggaaaaaaagaaggggaaaaaagaaagtctccccagacaagatgattgaaatgcaagcaaaaattgatgaggagagaaaagcacttgaaacaaagctcgacatggaagaagaagaaagaaacaaggctagagctgaattagagaaacgggaaaaagatcttcttaaagcccaacaagagcatcagtctttgctggaaaaattatctgccctggaaaagaaggtaattgttggtggggttgacttgttggccaaagctgaggaacaagagaaacttcttgaagaatctaacatggaactggaagaaaggaggaaaagagcagagcaacttcgcagagaacttgaggaaaaagagcaagaacgcttggatattgaagaaaaatataccagtttgcaagaggaagcacagggaaagaccaagaagttaaagaaagtttggactatgctgatggctgcaaagtcagagatggctgatctccaacaagaacatcagagggaaattgaaggcctactggagaacattcggcaacttagccgggagcttcgacttcagatgcttattattgataactttatacctcgggattatcaggaaatgattgaaaactatgtccattggaatgaagacataggagaatggcagctaaaatgtgttgcttatacaggaaataacatgaggaagcaaaccccagtacctgataaaaaggagaaagatccctttgaggtggacctttctcacgtgtatcttgcctatactgaggagagtctgcgtcagtctttgatgaaactagaaagaccacgaacttcaaaggggaaagcaaggccaaagacagggagaagaaagcgttctgcaaagcctgaaactgtaattgactctttactgcagtaaatgttacagacttaaagtcacaataaaaattagtgatattctcatgcctggacaaaatctttaattaaaacagtgaagacttctctataatttcaattaatggaagttgtagatcaatgaataagactggaaataataatttgcttaagaacttttagtctacatatattaatataacattaaaattgtacaactggtgattgttcaaattgttgtactactactcttcaattgtactgtgcagggaagttgggggaacagttcatactatagagagttacagtttagatgtatgtgtaaatcgattagctatttatccaactactgtatatttaggtaactagaatttcaaaatagaaaaaaaaaaactgtgtcctgttttgcacatagaaagaagcagatcagattgtcctatgttgcgctgttatatatgaatgtttggactgtacatctaaagaatgattccgtcctaacacccacccagcctgtttgaacacattctaattgtctaacatttgttgcattttaagtatgagatgactgatcttatgaatgttttgtagaaaatgttataatttaacagtctttgcgagtatacatgttttttaacaagttggaaatgtttcatctgaacctttcctaacttttttttgccagtttgagttcaaatcaaatacaccttaagttctggtttcatgttctcttgaaacattgaattgtacgtaaatataaaggatctactgttgcggaaaattaagaagctaaatactgctcagttatctttgcctgcgtgtatatttttaaaaattcactctgaagtgttatggatgcttttctttgagttctaaattttggtgggaattactttatgtctcccagttaagaagagtctccattttccagaaaatacagctaagcaagaaaaatatcttttaaatactttgcctttaaaacactttttattttgtttttctattttaaaaataaaatattattttctgaaaaaaaaaaagaaaaaaaaaaaaaaaa

SEQ ID NO: 49 - DNA, 1792 bp, Homo sapiens
tgcagatgccctgtgccgtgcagctcagcatgcataggtggggtagttggttgatgagcttttctttaggagaacagattttgagctatctttttttgttggaaccctgcacacaactgtcattatgtagatggttttcctctcaggtggttggttttctccagagaagaacccttgaatctcctgcctgtggaggtggacgtgtggttggtgttctgggtgccccttgccctgagctctgttctccatggtgcctgtttcctgggtctgcagccccttctcagtttctctgaagagtaaacctctcccctgcttggggaggagcatgggggttacgtagtagcctggctgcataacatgggcttagtagctcagttttccatcatgaaccagagcctcatctttcatggttcctgtgcctccgagggctgggctactggggtgtctgtcagtccagatggctttgttctcaagtttcctccacagtggatatgaatgtttgcaacttacactcaattacaacgctttcctctacttttctccaagtttgctgaaatctttatttgtggatatctcctctctttttgctttgtcctcataggttaaaacgttttaaaattccctaacagtaggaaatttagtagggttttggaagggagaggaggtgtaagatggtcactcttccatgtttaactggaagtggaaagtctaggcttttgcttcaggcctgggaggtgcacatgaaacagtccctcccagtggctgcctggggggtccctgaagggtgtgagaccaccgtgaatcctggggcagggcacttgcagtacatgtgctatgtgtttgctagtattgttttagatgtttgatctcctagcctttgcttttctttgtatttttcctgctttagtccatttcccttctagctccttctgttctcatttatcttctgctgctgcttggagttacattttcagcaagtctgtaacacctctctgaaccaaaggctctcaagttcatctttctttctccaagcctacgcctgtgctgctgtcatgagtggcgagcttctgtttcttctgtcttcttgtcagtcccaagtgcccttttacagagaatgcctgtttttcactgtctagctcagttaccaggagtccctgtgaatgacacccacaggtccctcaaagaagtcagatttctcttggacctgataaagcaaacaaaatgtgacccaagcaggctgagttggacgggtcccttcttaccttcgccctctgccatgttgacattcttatctgatggcacaggctgggagttcaggatccacttagatggggtccgttcaggggataccagcgttcacatttttccttttaagaaagggtcttggcctgaatgttccccatccggacacaggctgcatgtctctgtgagtgtcaaagctgccatgaccatctcggtaacctactcttactccacaatgtctatattcactgcagggctctatgattagtccataatgtaaatgcctggcccaagacgtatggcctgagtttatccaaggcccaaacaattaccaaacattcctcttagatagaagacagatttctttcccttggcaaagatcttctactaagatatgttacaggatgttttacattctcttggtcttataataacaccacgcccaatccagtatttgatgcgtcggtggtcactcggaaggttgttattttaaaaatacttattgttctcagtctgcagttctcacagctgtaaaaaaaaaaaaaaaaaa

SEQ ID NO: 50 - DNA, 2479 bp, Homo sapiens
tgaacatggagcccccggacgcaccggcccaggcgcgcggggccccgcggctgctgttgctcgcagtcctgctggcggcgcacccagatgcccaggcggaggtgcgcttgtctgtacccccgctggtggaggtgatgcgaggaaagtctgtcattctggactgcacccctacgggaacccacgaccattatatgctggaatggttccttaccgaccgctcgggagctcgcccccgcctagcctcggctgagatgcagggctctgagctccaggtcacaatgcacgacacccggggccgcagtcccccataccagctggactcccaggggcgcctggtgctggctgaggcccaggtgggcgacgagcgagactacgtgtgcgtggtgagggcaggggcggcaggcactgctgaggccactgcgcggctcaacgtgtttgcaaagccagaggccactgaggtctcccccaacaaagggacactgtctgtgatggaggactctgcccaggagatcgccacctgcaacagccggaacgggaacccggcccccaagatcacgtggtatcgcaacgggcagcgcctggaggtgcccgtagagatgaacccagagggctacatgaccagccgcacggtccgggaggcctcgggcctgctctccctcaccagcaccctctacctgcggctccgcaaggatgaccgagacgccagcttccactgcgccgcccactacagcctgcccgagggccgccacggccgcctggacagccccaccttccacctcaccctgcactatcccacggagcacgtgcagttctgggtgggcagcccgtccaccccagcaggctgggtacgcgagggtgacactgtccagctgctctgccggggggacggcagccccagcccggagtatacgcttttccgccttcaggatgagcaggaggaagtgctgaatgtgaatctcgaggggaacttgaccctggagggagtgacccggggccagagcgggacctatggctgcagagtggaggattacgacgcggcagatgacgtgcagctctccaagacgctggagctgcgcgtggcctatctggaccccctggagctcagcgaggggaaggtgctttccttacctctaaacagcagtgcagtcgtgaactgctccgtgcacggcctgcccacccctgccctacgctggaccaaggactccactcccctgggcgatggccccatgctgtcgctcagttctatcaccttcgattccaatggcacctacgtatgtgaggcctccctgcccacagtcccggtcctcagccgcacccagaacttcacgctgctggtccaaggctcgccagagctaaagacagcggaaatagagcccaaggcagatggcagctggagggaaggagacgaagtcacactcatctgctctgcccgcggccatccagaccccaaactcagctggagccaattggggggcagccccgcagagccaatccccggacggcagggttgggtgagcagctctctgaccctgaaagtgaccagcgccctgagccgcgatggcatctcctgtgaagcctccaacccccacgggaacaagcgccatgtcttccacttcggcaccgtgagcccccagacctcccaggctggagtggccgtcatggccgtggccgtcagcgtgggcctcctgctcctcgtcgttgctgtcttctactgcgtgagacgcaaagggggcccctgctgccgccagcggcgggagaagggggctccgccgccaggggagccagggctgagccactcggggtcggagcaaccagagcagaccggccttctcatgggaggtgcctccggaggagccaggggtggcagcgggggcttcggagacgagtgctgagccaagaacctcctagaggctgtccctggacctggagctgcaggcatcagagaaccagccctgctcacgccatgcccgcccccgccttccctcttccctcttccctctccctgcccagccctcccttccttcctctgccggcaaggcagggacccacagtggctgcctgcctccgggagggaaggagagggagggtgggtgggtgggagggggccttcctccagggaatgtgactctcccaggccccagaatagctcctggacccaagcccaaggcccagcctgggacaaggctccgagggtcggctggccggagctatttttacctcccgcctcccttgctggtccccccacctgacgtcttgctgcagagtctgacactggattcccccccctcaccccgcccctggtcccactcctgcccccgccctacctccgccccaccccatcatctgtggacactggagtctggaataaatgctgtttgtcacatcaaaaaaaaaaaaaaaaaaaaaaaaaaaaaaaaaaaaaaaaaaaaaaaaaaaaaaaaaaaaaaaaaaaaaaaaaaaaaaaaaaaaaaaaaaaaaa

SEQ ID NO: 51 - DNA, 2774 bp, Homo sapiens
ttttttgtcctcagccccagcagccgcccggctggctgcagaggccgaggggccgagggcaccggagcgcaagggattccgcggcaccacgtgtccaagccgggctaaggcgggcggagcgggccgggcccggctccccgggcctgagcgcaaaccagcagcgacgcggggtcccgtccgcaccggcacccggcccagccggggcccggtctcccgggcgcacgtaggctcctcctcctggacagcgcgatggggcccttctgggcgagaaaggatgacacaggctgtcctagcagccagtcagtgtctcctgtgaagacaccctcagatgctggaaacagccccattggcttttgccctggaagtgatgaaggcttcaccagaaagaaatgcacgattggaatggttggtgaaggaagcattcagtcctctcgatataagaaggaatcaaagtcaggccttgtgaaaccaggtagtgaagctgattttagctcctcgagcagcacaggcagcatttccgctcctgaggtccatatgtcgactgcgggaagcaagcggtcttcttcttcacgcaatcgaggtcctcatgggcggagtaatggagcttcgtcacacaagcctggcagcagcccatcatccccgcgggaaaaggaccttctgtccatgctgtgcaggaatcagctgagccctgtcaatatccatcccagttatgcaccttcttccccaagcagtagcaactcaggctcctacaaaggaagcgactgtagccccatcatgaggcgttctggaaggtacatgtcttgcggtgaaaatcatggtgtcagacccccaaacccagagcagtatttgactccactgcagcagaaagaggtgacagtgagacacctcaaaaccaagctgaaggaatctgagcgccgactccatgaaagggaaagtgaaatcgtggagcttaagtcccagctggcccgcatgcgagaggactggattgaggaggagtgtcaccgggtagaggcccagttggcactcaaagaagccaggaaagagattaaacagctcaaacaggtcatcgaaaccatgcggagcagcttggctgataaagataaaggcattcagaaatattttgtggacataaacatccaaaacaagaagctggagtctctccttcagagcatggagatggcacacagtggctctctgagggacgaactgtgcctagactttccatgtgattccccagagaagagcttaaccctcaacccccctcttgacacaatggcagatgggttatctctggaagagcaggtcacgggggaaggggctgacagggagctactggtaggagatagcatagccaacagcacaggtttgttcgatgagatagtgacagccaccaccacagaatctggtgacctggagcttgtgcattccacccctggggctaacgtcctggagctgctgcccatagtcatgggtcaggaggagggcagtgtggtggtggagcgagccgttcagaccgacgtggtgccctacagcccagccatctcagagctcattcagagtgtgctgcagaagctccaggacccctgtccctcgagcttggcgtcccctgatgagtctgaaccagactcgatggagagcttcccagagtccctctctgccttagtggttgatttaactccaagaaatccaaactcagccatccttttgtctcccgtggagaccccctacgccaatgtggatgcagaagttcatgcaaaccgcctcatgagagagctggattttgcagcctgcgtggaagagaggttggatggtgtcatcccactggctcgcgggggcgtcgtgaggcagtactggagcagcagcttcctggtggatctcctggctgtggctgcccccgtggtccccacggttctgtgggcattcagtactcagagagggggaacggatcctgtgtataacatcggggccttgctcaggggctgttgcgtggttgccctgcattcgctccgccgcaccgccttccgtatcaaaacctaaatagaagttgttgttaccgtgtgccaatgtgtcccatgtgggttgtgccaggtagagaaacaggaagtcaatcatctgtgacagtctctattctgtcgttttgctccttggtatttgatttgcactatatttagttgaagcctgttcactgtttaaaaccggaggtatcttcaaaggcatggagacctggttccagtaaatgtcccaccagtggggtatagaaagcatgctcatgaccctgccgtgtcgtctgaggtacccgttcttatcctagtggttcaggaagagaaaacgcagtttgcactttcaagacagcttctctaaggctggcatgttatctccttgctttgctttttgccgttttaaaatgtgtaattgttccagcattccaatggtcttgtgcatagcaggggactgtaaccaaaaataaacatgtatttgtgtaattggtttgaagaagtcttgaatagctctttactgtcttacttggggttgataagatttgagtgtttgcaattttttactaaatgtagctccaagtcttaaatggcttgtttgttcttaaactgttaattgatgaaactgtgcataagtttacatgtactaacttattttgcttattatatatagtgttttattggaaattgtaaccacacacttcagcatgatgaaaataaagattagtgtttccatttaaataaatgttttatcctcccataaaaaaaaaaaaaaaaaaa

SEQ ID NO: 52 - DNA, 1218 bp, Homo sapiens
aaaggtctaggatgacatctggtgtattgactgtggccagtcttaaagctagtttttgctatgtggaacatgctgctctaattcagatttaaagagtttcttcctgttaattcgaagctcactgtgcctcttgtttccgagggaagaaggactgattaagtcatctaaatggatgcaatactgaattacaggtcagaagatactgaagattactacacattactgggatgtgatgaactatcttcggttgaacaaatcctggcagaatttaaagtcagagctctggaatgtcacccagacaagcatcctgaaaaccccaaagctgtggagacttttcagaaactgcagaaggcaaaggagattctgaccaatgaagagagtcgagcccgctatgaccactggcgaaggagccagatgtcgatgccattccagcagtgggaagctttgaatgactcagtgaagacgtcaatgcactgggttgtcagaggtaaaaaagacctgatgctggaagaatctgacaagactcataccaccaagatggaaaatgaggaatgtaatgagcaaagagaaagaaagaaagaggagctggcttcaaccgcagagaaaacggagcagaaagaacccaagcccctagagaagtcagtctccccgcaaaattcagattcttcaggttttgcagatgtgaatggttggcaccttcgtttccgctggtccaaggatgctccctcagaactcctgaggaagttcagaaactatgaaatatgaaatatctctgcttcaaaaaatgaggaagagcaagactgtcccctatgctgccaacatgcagtctttgtttatgtcttaaaaatgtcatgtttatgtcatgtctgtgaattgctgagtactaattgattcctccatccttgaatcagttctcataatgctttttaaataagaaaaattcagaagatgaatttcttccaatatttgaataaattaaagctcttagatacagagtagattgtattatatgctttttcctattaatactacttatagaaatccattaaaaagcaatctctgtacagtgtatttaaatatttcattgacatactgtgatctctattagtgatggatgtacaaaaaatgttttcttacccttgacttacaatgaaatgtgaaattacttgtctgaaccccgtggggagaaataaataattttcccaaagttcaaaaaaa

SEQ ID NO: 53 - DNA, 1441 bp, Homo sapiens
ggcggggccgaggctggcgggcgcggggaaaatggcggcggcggcggcggcggctgcagctacgaacgggaccggaggaagcagcgggatggaggtggatgcagcagtagtccccagcgtgatggcctgcggagtgactgggagtgtttccgtcgctctccatccccttgtcattctcaacatctcagaccactggatccgcatgcgctcccaggaggggcggcctgtgcaggtgattggggctctgattggcaagcaggagggccgaaatatcgaggtgatgaactcctttgagctgctgtcccacaccgtggaagagaagattatcattgacaaggaatattattacaccaaggaggagcagtttaaacaggtgttcaaggagctggagtttctgggttggtataccacaggggggccacctgacccctcggacatccacgtccataagcaggtgtgtgagatcatcgagagccccctctttctgaagttgaaccctatgaccaagcacacagatcttcctgtcagcgtttttgagtctgtcattgatataatcaatggagaggccacaatgctgtttgctgagctgacctacactctggccacagaggaagcggaacgcattggtgtagaccacgtagcccgaatgacagcaacaggcagtggagagaactccactgtggctgaacacctgatagcacagcacagcgccatcaagatgctgcacagccgcgtcaagctcatcttggagtacgtcaaggcctctgaagcgggagaggtcccctttaatcatgagatcctgcgggaggcctatgctctgtgtcactgtctcccggtgctcagcacagacaagttcaagacagatttttatgatcaatgcaacgacgtggggctcatggcctacctcggcaccatcaccaaaacgtgcaacaccatgaaccagtttgtgaacaagttcaatgtcctctacgaccgacaaggcatcggcaggagaatgcgcgggctctttttctgatgagggtacttgaagggctgatggacaggggtcaggcaactatcccaaaggggagggcactacacttccttgagagaaaccgctgtcattaataaaaggggagcagcccctgagcacccctgctggtggctctgtcctctgttaggcaccacactggttggtcaacttggatgttcatcgaggctcattctggccttgctcagaagcccttctgatgctcttcagtgagggaggcactaccatttgaagtgaccccatgtcagtcacatggactggtctttagcaaagtccaaggctgcctgcttccacctaagtggtctctgttctacactttaatgtcaccctctacatcatcttacctagcccacccaaccttataaacatgataattgactactttcctgagctaaaaaaaaaaaaaaaaaa

SEQ ID NO: 54 - DNA, 1202 bp, Homo sapiens
gagcaaagggcacgtgagcgaggcgcccgaagccgtcgcggcggggaccatgttgcttccgaacatcctgctcaccggtacaccaggggttggaaaaaccacactaggcaaagaacttgcgtcaaaatcaggactgaaatacattaatgtgggtgatttagctcgagaagtctgatcatcggatatcatggagtctggcaagacggcttctcccaagagcatgccgaaagatgcacagatgatggcacaaatcctgaaggatatggggattacagaatatgagccaagagttataaatcagatgttggagtttgccttccgatatgtgaccacaattctagatgatgcaaaaatttattcaagccatgctaagaaagctactgttgatgcagatgatgtgcgattggcaatccagtgccgcgctgatcagtcttttacctctcctcccccaagagattttttattagatattgcaaggcaaagaaatcaaacccctttgccattgatcaagccatattcaggtcctaggttgccacctgatagatactgcttaacagctccaaactataggctgaaatctttacagaaaaaggcatcaacttctgcgggaagaataacagtcccgcggttaagtgttggttcagttactagcagaccaagtactcccacactaggcacaccaaccccacagaccatgtctgtttcaactaaagtagggactcccatgtccctcacaggtcaaaggtttacagtacagatgcctacttctcagtctccagctgtaaaagcttcaattcctgcaacctcagcagttcagaatgttctgattaatccatcattaatcgggtccaaaaacattcttattaccactaatatgatgtcatcacaaaatactgccaatgaatcatcaaatgcattgaaaagaaaacgtgaagatgatgatgatgacgatgatgatgatgatgactatgataatctgtaatctagccttgctgaatgtaacatgtatacttggtcttgaattcattgtactgatattaaacatgcatgctggatgttttcaagttgtgttttagaaaactaataataatgagtaaacacagttaccatacttttcaattgaaatgaaggtttttcatcagccttaaaagtgtaagaaaaataaagttgtcattcattcgaaaaaaaaaaaaaaaaaaaaa

SEQ ID NO: 55 - DNA, 2978 bp, Homo sapiens
atgccatacacactgtgtaattataaaaagaaatataataaaattttggggccatggtaatacctgtaataaattgagatcttacccctaaagtgggaacatggtagtttctaagtgacagtataacttgaccaacataatcgtacatcttttgaaattgctggtgatagagaattttatgtcagcggaaggaattaggatttaattatattatgtgtggcacagatatattttaaggctgaggttacctctccccattgtggtaaggaattcatgccgtttcctttttcagcttgcttgttagtgtgctagatctcagtttctaggtttttggcttttgttttttttttgtatttgtgtctttagattgtgccttgccagtacatgctgcagacaatgaaggatgagcaagttttctacattcaatacttgaagtccatggcattttcagtgtactgccagtgcaggcgaccactgcctacacagatccacattaaatccctcacgggatttgggcctgcagccagcattgagatgaccctcaagaaccctgaggtaggtattggcaggacagaaacttagaaaatttatactaaaatgcaagctagaagaggtattttatctaacccagagattggctggttgcttagttggtcttctacattgatataagagttgctaggctggatgtgttggctcacgcctgtagtcttagcactttcggaggctgaggtggaaggattgcttaagcctaggagtttgagaccacactgggcaacatagcaagaccccatctctacaaattttcttttaaaaattatccaggtgtgatgtgtgccggtagtcctggctgtttgggaggctgaggtggaaggatcacttgagcccaggagtttgagatggcagtgagctgtgatcacataaccacttccgcctggagagcaagaccctgtctcaggggggaataaaaacgagttggcaggtttctttaactcttaggtttaaatagaggagatacttctctgaactttaaaacatttttgagaagagaggcaagcaaattcttactgttttttttatgtaggactttaggcaataataaatgtatcccttttagtttttaatgttttaatttcctaaatttattttctttatttttctaagctaatctgtgtcttagatcagaaatcctttgcgttttccagctctggtctgtatcctgggacaacagttgtagttgtgtttactctgcaggggtccctcgttttgtgatgcacatacttagaggaagttgatttctcctttccttgcctcagtgcttccgtatataaatgaatgcattttcactccatcttttaaaacctacttcctacagatatgtgtggatctcaaagggaattttacaacaccaaagctaaacatgttttaaacaaaagttttacacttcctttgtttttctaatcaccttatcttgaagataggtataaaaagcaatgttcagaattttcaaagccttcaaaaatcagttcccacaattttattgcatgaaaagtatcccattagtaaaagccagcatacacctctttaccataagagagctccttaaaacaccaattgctatttttagttggtaatgttgttctgaacaactctatgaaatgcttgcacttttataagtaaaatgcttgggagtgaaaaatgatgcaagtagttaacactgtgtttgttgtaacttggtgcaggtcagcttagtcccaagggagaaaagctgctcagccaatgacctacattcactccagtgttatataaaatttctattttaggcagttttagtttagtttattctttgagtttgaatttttcacttctatgagcaattcatctgttttccctgttaaatttttctagaatttcaaaaataaatgtctctacttgttttttattttgtttccagaaattatgaattattgcctttctaaaggttattatgctcaggcagaacaccatcaggagctcataagataaagtgaggtttagattaaaataaatggcaaaaagacttcgagtaatatcgtttttctccattttgcttggaacaggaagagagaagtaaatgattttactttattaaaaacaaaagaaccaaatgttataaatatttgctgaagtttatacattttaatctgcattaaggtaatggttagttggtcaatgctgcctctgcctcagtctgcagcgagaacattgtgttttcatttggtaaatacagttgagcatctacggtgtgccaggtgctgtattaggtgctaaggatgcaggggtgaacaaaacaggcccctgcctccatgcaattctcattctctgggtggcacagttttatgcaagttatcacatgtgaaagaatttatagtttttgttatgcaagttttcaaataaatccaattgctgttatcttttgtttttcatggaatatctcgcatctcagaacacagtttgggaatcatattttatttagtgttttcagatgctatctattatatctaagatatttcacatttagccattcgttttataaaaaactccaggcaaactcagctggacttttcttgctttaataacagctttattgagatacaattcacatatcacgaaattctttttaaaaattttacagttcaggccgggcgcggtggctcatgcctataatcccaacactttgggaggctgaggctggcgggtcacctgaggtcaggagttcgagaccagcttggccagcatggcaaaatcccgtctccactaaaaataaaaaaattagccaggcgtggtggcggatgcctataatcccagctacttgggaagctgaggcgggagaattgcttgaatccatgaggtggaggttgcagtgagccaagatcacgccactgcactccagtctcggcgacagagtgagactctgtctccaaaaaaaaaaaaaaaaa

SEQ ID NO: 56 - DNA, 1109 bp, Homo sapiens
gcttcgccggggccgggcggccggcgcccccggctgctcccgccgccgcccggacccgcgccccgccggggcagcggtggtgagagccccgactccccggacgccgcccgccgtgccatggggttcccggccgcggcgctgctctgcgcgctgtgctgcggcctcctggccccggctgcccgcgccggctactccgaggagcgctgcagctggaggggcagcggcctcacccaggagcccggcagcgtggggcagctggccctggcctgtgcggagggcgcggttgagtggctgtacccggctggggcgctgcgcctgaccctgggcggccccgatcccagagcgcggcccggcatcgcctgtctgcggccggtgcggcccttcgcgggcgcccaggtcttcgcggagcgcgcagggggcgccctggagctgctgctggccgagggcccgggcccggcagggggccgctgcgtgcgctggggtccccgcgagcgccgggccctcttcctgcaggccacgccgcaccaggacatcagccgccgcgtggccgccttccgctttgagctgcgcgaggacgggcgccccgagctgcccccgcaggcccacggtctcggcgtagacggtgcctgcaggccctgcagcgacgctgagctgctcctggccgcatgcaccagcgacttcgtaattcacgggatcatccatggggtcacccatgacgtggagctgcaggagtctgtcatcactgtggtggccgcccgtgtcctccgccagacaccgccgctgttccaggcggggcgatccggggaccaggggctgacctccattcgtaccccactgcgctgtggcgtccacccgggcccaggcaccttcctcttcatgggctggagccgctttggggaggcccggctgggctgtgccccacgattccaggagttccgccgtgcctacgaggctgcccgtgctgcccacctccacccctgcgaggtggcgctgcactgaggggctgggtgctggggaggggctggtaggagggagggtgggcccactgctttggaggtgatgggactatcaataagaactctgttcacgcaaaaaaaaaaaaaaaaaaa

SEQ ID NO: 57 - DNA, 600 bp, Homo sapiens
ctcttcgttaagtcggccttcccaacatggcgcagtctattaacatcacggagctgaatctgccgcagctagaaatgctcaagaaccagctggaccaggaagtggagttcttgtccacgtccattgctcagctcaaagtggtacagaccaagtatgtggaagccaaggactgtctgaacgtgctgaacaagagcaacgaggatgtatgtccctgggaagctgcatgatgtggaacacgtgctcatcgatgtgggaactgggtactatgtagagaagacagctgaggatgccaaggacttcttcaagaggaagatagattttctaaccaagcagatggagaaaatccaaccagctcttcaggagaagcacgccatgaaacaggccgtcatggaaatgatgagtcagaagattcagcagctcacagccctgggggcagctcaggctactgctaaggcctgagagtttttgcagaaatggggcagagggacaccctttgggcgtggcttcctggtgatgggaagggtcttgtgttttaatgccaataaatgtgccagctgggcaaaaaaaaaaaaaaaaaaaaaaaaaaaaaaaaaaaaaaaa

SEQ ID NO: 58 - DNA, 2176 bp, Homo sapiens
aaaaatgcaatgattattgatatctaggtgacctgaaaaaaaatagtgaatgtgctttgtaaactgtaaagcacttgtattctactgtgataagcgttgtggatacaaagaaaggagcaagcataaaaaagtgctctttcaaaaggatatagtactatgcagacacaaggaattgtttgataaatgaataaattatatgtatatttgaggccaatttgtgtttgctgctctggtaattttgagtaaaaatgcagtattccaggtatcagaaacgaaaacacatggaaactgcttttaaactttaaaatatactgaaaacataagggactaagcttgttgtggtcacctataatgtgccagataccatgctgggtgctagagctaccaaagggggaaaagtattctcatagaacaaaaaatttcagaaaggtgcatattaaagtgctttgtaaactaaagcatgatacaaatgtcaatgggctacatatttatgaatgaatgaatggatgaatgaatattaagtgcctcttacataccagctattttgggtactgtaaaatacaagattaattctcctatgtaataagaggaaagtttattctctatactattcagatgtaaggaatgatatattgcttaattttaaacaatcaagactttactggtgaggttaagttaaattattactgatacatttttccaggtaaccaggaaagagctagtatgaggaaatgaagtaatagatgtgagatccagaccgaaagtcacttaattcagcttgcgaatgtgctttctaaattataaagcacttgtaaatgaaaaatttgatgctttctgtatgaataaaactttctgtaagctaggtattgtctctacaaaattctcattgtatagttaaaccacagtgagaagggttctataagtagttatacaaaccaagggtttaaatacctgttaaatagatcaattttgattgcctactatgtgaactcactgttaaaggcactgaaaatttatcatatttcatttagccacagccaaaaataaggcaatacctatgttagcattttgtgaactctaaggcaccatataaatgtaactgttgattttctcacttggtgctgggtactaggtttataaaattgtatgatagttattatattgtgcaaataaagtaggaaaatttgaataacaatgattatcttttgaatacgcatacgcaagggattggttgtctgaagaatgccactatagtagttatctattgtgtgccaatctcattgctaggcattggggatgcaaagataaaccatctttattgtgtcttgggtagcagaagaaaatatgtgtaaaatcaatttataatttgtaaactgccacccatatataagctatatctgctgaatgatcattgattactcttatccttagagataacaactgggggcacaaacatttattatcattattgaacctacaacagagatctatgtgtagatttacgaagcctacagttctatacagataggaatgaactattggcttactgaatggtgattactttctgtggggctcggaactacatgccctaggatataaaaatgatgttatcattatagagtgctcacagaaggaaatgaagtaatataggtgtgagatccagaccaaaagtcatttaacaagtttattcagtgatgaaaacatgggacaaatggactaatataaggcagtgtactaagctgagtagagagataaagtcctgtccagaagatacatgcttcctggcctgattgaggagatggaaaatttttgcaaaaaacaaggtgttgtggtcttccatccagtttcttaagtgctgatgataaaagtgaattagacccaccttgacctggcctacagaagtaaaggagtaaaaataaatgcctcaggcgtgctttttgattcatttgataaacaaagcatcttttatgtggaatataccattctgggtcctgaggataagagagatgagggcattagatcactgacagctgaagatagaagaacatctttggtttgattgtttaaataatatttcaatgcctattctctgcaaggtactatgtttcgtaaattaaataggtctggcccagaagacccactcaattgcctttgagattaaaaaaaaaaaaaaaaa

SEQ ID NO: 59 - DNA, 6519 bp, Homo sapiens
gcacgagcggctccggcggcgccatgacgcgctgggtgcccaccaagcgcgaggagaagtacggcgtggctttttataactatgatgccagaggagcggatgaactttctttacagatcggagacactgtgcacatcttagaaacatatgaagggtggtaccgaggttacacgttacgaaaaaagtctaagaagggtatatttcctgcttcatatattcatcttaaagaagcgatagttgaaggaaaagggcaacatgaaacagtcatcccgggtgacctccccctcatccaggaagtcaccacgacactccgagagtggtccaccatctggaggcagctctacgtgcaagataacagggagatgtttcgaagtgtgcggcacatgatctatgaccttattgaatggcgatcacaaattctttctggaactctgcctcaggatgaactcaaagaactgaagaagaaggtcacagccaaaattgattatggaaacagaattctagatttggacctggtggttagagatgaagatgggaatattttggatccagaattaactagcacgattagtctcttcagagctcatgaaatagcttctaaacaagtggaggaaaggttacaagaggaaaaatctcaaaagcagaacatagatattaacagacaagccaagtttgctgcaaccccttctctggccttgtttgtgaacctcaaaaatgtggtttgtaaaataggagaagatgctgaagtcctcatgtctctatatgaccctgtggagtccaaattcatcagtgagaactacctggttcgctggtccagttcaggattacctaaagacatagacagattacataatttgcgagccgtgtttactgacctcggaagcaaagacctgaaaagggagaaaatcagttttgtctgtcagattgttcgcgtgggtcgcatggagctgagggacaacaacaccaggaaactgacctcggggttgcggcgaccttttggagtggctgtgatggatgtaacagatataataaatggaaaagtagatgatgaagataagcagcatttcattccctttcagccggtggcaggggagaatgacttccttcagactgttataaacaaagtcatcgctgccaaagaagtcaaccacaaggggcagggtttgtgggtaacattgaaattacttcctggagatatccatcagatccgaaaagagtttccgcatttagtggacaggaccacagctgtggctcgaaaaacagggtttccggagataatcatgcctggtgatgttcgaaatgatatctatgtaacattagttcaaggagattttgataaaggaagcaaaacaacagcgaagaacgtggaggtcacggtgtctgtgtacgatgaggatgggaaacgattagagcatgtgattttcccgggtgctggtgatgaagcgatttcagagtacaaatctgtgatttactaccaagtaaagcagccacgctggtttgagactgttaaggtggccattcccatcgaggacgttaaccgcagtcaccttcggtttaccttccgccacaggtcatcacaggactctaaggataaatctgagaaaatatttgcactagcatttgtcaagctgatgagatacgatggtaccaccctgcgagacggagagcacgatcttatcgtctataaggccgaagcgaagaagctggaagatgctgccacgtacttgagtctgccctccacgaaggcagagttggaagaaaagggccactcggccaccggcaagagcatgcagagccttgggagctgcaccattagcaaggactccttccagatctccacgctcgtgtgctccaccaaactgactcagaacgtggaccttctggggctcttgaaatggcgctccaacaccagcctgctgcagcagaacttgaggcagctgatgaaagtcgatggtggtgaagtagtgaagtttcttcaggacacgttggatgccctcttcaacatcatgatggagaactcagagagtgagacttttgacacgttagtctttgatgctctggtatttatcattggactgattgctgatagaaaatttcagcattttaatcctgttttggaaacttacattaagaaacactttagtgcaacgttagcctacacgaagttgacaaaagtgttgaagaactacgtggacggtgctgagaagccgggagtaaatgagcagctgtacaaagccatgaaagcgctagaatccatcttcaagttcatcgtgcgctccaggatcctgttcaatcaactgtatgaaaacaagggagaggctgacttcgtggaatctttgctgcagctcttcaggtccatcaatgacatgatgagcagcatgtcagaccagaccgtccgggtgaagggggcagcactgaaatacttaccaacgatcgtcaacgatgtgaaattggtgtttgatcccaaagagctcagcaaaatgtttactgaattcatcctcaatgttcccatgggcttgctgaccatccagaaactctactgcttgatcgaaatcgtccacagtgacctcttcacacagcatgactgcagagagatcctgcttcccatgatgaccgatcagctcaagtaccatctggagagacaggaggacctggaggcctgctgtcagctgctcagccacatcctggaggtgctgtacaggaaggacgtggggccaacccagaggcacgtccagattatcatggagaaacttctccggaccgtgaaccgaaccgtcatttccatgggacgagattctgaactcattggaaacttcgtggcttgcatgacagctattttacgacaaatggaagattaccattatgcccacttgatcaagacttttgggaaaatgaggactgatgtggtagatttcctaatggaaacattcatcatgtttaagaacctcattggaaagaacgtttaccccttcgactgggtgatcatgaacatggtgcaaaataaagtcttcctgcgagcaattaatcagtatgcagatatgctgaacaaaaaatttctggatcaagccaactttgagctacagctgtggaacaactactttcacctggctgttgctttccttactcaagagtccctgcaactggagaatttttcaagtgccaagagagccaaaatccttaacaagtacggagatatgaggagacagattggctttgaaatcagagacatgtggtacaaccttggtcaacacaagataaagttcattccagaaatggtgggcccaatattagaaatgacattaattcccgagacggagctgcgcaaagccaccatccccatcttctttgatatgatgcagtgtgaattccattcgacccgaagcttccaaatgtttgaaaatgagatcatcaccaagctggatcatgaagtcgaaggaggcagaggagacgaacagtacaaagtgttatttgataaaatccttctggaacactgcaggaagcacaaatacctcgccaaaacaggagaaacttttgtaaaactcgttgtgcgcttaatggaaaggcttttggattatagaaccatcatgcacgacgagaacaaagaaaaccgcatgagctgcaccgtcaatgtgctgaatttctacaaagaaattgaaagagaagaaatgtatataaggtatttgtacaagctctgtgacctgcacaaggagtgtgataactacaccgaagcggcttacaccttgcttctccatgcaaagcttcttaagtggtcggaggatgtgtgtgtggcccacctcacccagcgggacgggtaccaggccaccacgcagggacagctgaaggagcagctctaccaggaaatcatccactacttcgacaaaggcaagatgtgggaggaggccattgccttgggcaaggagctagccgagcagtatgagaacgaaatgtttgattatgagcaactcagcgaattgctgaaaaaacaggctcagttttatgaaaacatcgtcaaagtgatcaggcccaagcctgactattttgctgttggctactacggacaagggttccccacattcctgcggggaaaagttttcatttaccgagggaaagagtatgagcgccgggaagattttgaggctcggctcttaactcagtttccaaacgccgagaaaatgaagacaacatctccaccaggcgacgatattaaaaactctcctggccagtatattcagtgcttcacagtgaagcccaaactcgatctgcctcctaagtttcacaggccagtgtcagagcagattgtaagtttttacagggtgaacgaggtccagcgatttgaatattctcggccaatccggaagggagagaaaaacccagacaatgaatttgcgaatatgtggatcgagagaaccatatatacaactgcatataaattacctggaattttaaggtggtttgaggtcaagtctgttttcatggtggaaatcagccccctggagaatgccatcgagaccatgcagctgacgaacgacaagatcaacagcatggtgcagcagcacctggatgaccccagcctgcccatcaacccgctctccatgctcctgaacggcatcgtggacccagctgtcatggggggcttcgcaaactacgaaaaggccttctttacagaccggtacctgcaggagcaccctgaggcccatgaaaagatcgagaagctcaaggacctgattgcttggcagattccttttctggccgaagggatcagaatccatggagacaaagtcacggaggcactgaggccgttccacgagaggatggaggcctgtttcaaacagctgaaggaaaaggtggagaaagagtacggcgtccgaatcatgccctcaagtctggatgatagaagaggcagccgcccccggtccatggtgcggtccttcacgatgccttcctcatcccgccctctgtctgtggcctctgtctcttccctctcatcggacagcaccccctccagaccaggctccgacgggtttgccctggagcctctcctgccaaagaaaatgcactccaggtcccaggacaagctggacaaggatgacctggagaaggagaagaaggacaagaagaaggaaaaaaggaacagcaaacatcaagagatatttgagaaagaatttaaacccaccgacatttccctgcagcagtctgaggctgtgatcctttcggaaacgataagtcccctgcggccccagagaccgaagagccaggtgatgaacgtcattggaagcgaaaggcgcttctcggtgtccccctcgtcaccgtcctcccagcaaacaccccctccagttacaccaagagccaagctcagcttcagcatgcagtcgagcttggagctgaacggcatgacgggggcggacgtggccgatgtcccaccccctctgcctctcaaaggcagcgtggcagattacgggaatttgatggaaaaccaggacttgctgggctcgccaacacctccacctccccctccacaccagaggcatctgccacctccactgcccagcaaaactccgcctcctccccctccaaagacaactcgcaagcagacatcggtggactctgggatcgtgcagtgacatcgcaaggctctctggaaagagtgtgctgcccctccccatctccatgccctctccttctgtgtcccctgagtctgctgtttacctcattgggcctgtgatgttaacatttcgtgcgactgctttttcttcaaaggagttcagttctcaccatggagtgagtggcctttagcgtcatggagcaaggtgggtctgggaggtagatatgggtccgggatgtgccatcgtagttaccagagttgggggcctctgagtgtgtctggctctgagagagtctgagtcttgcccaaacattctttctttttgtgccaaatgacttgcatttgcaaagagctcaattgctctgagctcagccaagtaggagaggctaggccatcactcttgggaagctgtgtagtgatgatgtataagaatcctcctcactgtcatgggatgttgtatccagcccctccttgttccagccggtggtgtgacttcgttggttgaggtgtgtctccaacctacatcagaccatgaagttcaacccctccagggaagctcctgatttcccctgcataattgaaaataggatattctcagctattgaacagttactaatttatggggtggaaacagcattaagaatactgaatcaaatggaaaaacaaatgaatacaggaagataagtgttcgttcttttctgaaaaaagagtatgtgtaccacaagagctggttttaattgggtgaattgtttttgtcctcattctgtacagaaatttgtatatatgatggttcttagaacttgttttaatttttgtggtccttctgtttattataataggcgtccaccaatgattatccatatgtgttcttaatttttaactgctggaagtgttaaaacacacacaccccggaattc

SEQ ID NO: 60 - DNA, 532 bp, Homo sapiens
tttcactgataacattgctttattaactgcgttggtggctcatttggagggcaaggggctccctatgacacaagccctggtggggccggggtctggaagcccccatgagtgagcaggacaggatggggctgggaactatgcagcagcggcaacacagaatcatgcagggcacagcgggcactggccacacccaggtgaccatacattctattgctcgttaagggttgcgcacatggacaatgtacaaaaaggagaaataggtctttgcgttaatgaaaaatacattttttctctacaaaggaatcttttctaatacaagaaaataaatattgcaacataagccaaaaataatttaaaattgctcttttcaatatattttcaatatttctcttgtatattaacaaatggcacatcactttctttgaaacaaagacagaaggtgtctcctcctgtgacattcatatcatccccccaccgtcccctcaaactgacgtggaacacaaagtgtttgtgcctctgagggagaaagtgg

SEQ ID NO: 61 - DNA, 5286 bp, Homo sapiens
gcgcgcctgtcgcggtggtgggtgcaggactggacccacgggcccattgtgcgcccgcccgcggcagccaggaccatgtgggtgaacccggaggaggtgttgctggccaacgcgctgtggatcaccgagagggccaacccatacttcatcctgcagcggaggaagggccacgccggcgatggaggcggcggcggcggactggcgggcctgctggtgggtacccttgatgttgtgttggactccagcgcccgggtcgctccttaccgaatcttgtaccagactccagactccctggtctactggaccatcgcctgtggtggttccaggaaagaaatcactgaacactgggaatggcttgagcaaaatctcttgcagacactctccatctttgaaaatgagaatgatatcaccacatttgtgagaggaaaaatacagggcatcattgcagaatacaacaaaatcaatgatgtaaaggaagatgatgacacggagaagtttaaagaagccattgtgaaatttcataggctgtttgggatgccagaggaagagaaactcgtcaactattactcttgcagctattggaaggggaaggtcccccgtcagggttggatgtacctcagcattaaccacctttgcttttattcttttcttatgggaagggaagcgaaactggtcatccggtgggtagacatcactcagcttgagaagaatgccaccctgcttctgcctgatgtgatcaaagtgagcacacggtccagtgagcatttcttctctgtattcctcaacatcaacgagaccttcaagttaatggagcagcttgccaacatagccatgaggcaactcttagacaatgagggatttgaacaagatcgatccctgcccaaactcaaaaggaaatctcctaaaaaagtgtctgctctaaaacgtgatcttgatgccagggcaaagagtgagagataccgtgcacttttccggctgcccaaagatgaaaaattagatggccacacagactgcactctctggactccatttaacaaaatgcacattttggggcagatgtttgtgtccacaaattacatctgttttaccagcaaggaggagaacttatgtagcctcattatcccgctccgtgaggtgacaattgtggaaaaggcagacagctccagtgtgctccccagtcccttatccatcagcacccgaaacaggatgaccttcctatttgccaacttgaaagatagagactttctagtgcagaggatctcagatttcctgcaacagactacttccaaaatatattctgacaaggagtttgcaggaagttacaacagttcagatgatgaggtgtactctcgacccagcagcctcgtctcctccagcccccagagaagcacgagctctgatgctgatggagagcgccagtttaacctaaatggcaacagcgtccccacagccacacagaccctgatgaccatgtatcggcggcggtctcccgaggagttcaacccgaaattggccaaagagtttctgaaagagcaagcctggaagattcactttgctgagtatgggcaagggatctgcatgtaccgcacagagaaaacgcgggagctggtgttgaagggcatcccggagagcatgcgtggggagctctggctgctgctgtcaggtgccatcaatgagaaggccacacatcctgggtactatgaagacctagtggagaagtccatggggaagtataatctcgccacggaggagattgagagggatttacaccgctcccttccagaacacccagcttttcagaatgaaatgggcattgctgcactaaggagagtcttaacagcttatgcttttcgaaatcccaacatagggtattgccaggccatgaatattgtcacttcagtgctgctgctttatgccaaagaggaggaagctttctggctgcttgtggctttgtgtgagcgcatgctcccagattactacaacaccagagttgtgggtgcactggtggaccaaggtgtctttgaggagctagcacgagactacgtcccacagctgtacgactgcatgcaagacctgggcgtgatttccaccatctccctgtcttggttcctcacactatttctcagtgtgatgccttttgagagtgcagttgtggttgttgactgtttcttctatgaaggaattaaagtgatattccagttggccctagctgtgctggatgcaaatgtggacaaactgttgaactgcaaggatgatggggaggccatgaccgttttgggaaggtatttagacagtgtgaccaataaagacagcacactgcctcccattcctcacctccactccttgctcagcgatgatgtggaaccttaccctgaggtagacatctttagactcatcagaacttcctacgagaaattcggaactatccgggcagatttgattgaacagatgagattcaaacagagactgaaagtgatccagacgctggaggatactacgaaacgcaacgtggtacgaaccattgtgacagaaacttcctttaccattgatgagctggaagaactttatgctcttttcaaggcagaacatctcaccagctgctactggggcgggagcagcaacgcgctggaccggcatgaccccagcctgccctacctggaacagtatcgcattgacttcgagcagttcaagggaatgtttgctcttctctttccttgggcatgtggaactcactctgacgttctggcctcccgcttgttccagttattagatgaaaatggagactctttgattaacttccgggagtttgtctctgggctaagtgctgcatgccatggggacctcacagagaagctcaaactcctgtacaaaatgcacgtcttgcctgagccatcctctgatcaagatgaaccagattctgcttttgaagcaactcagtacttctttgaagatattaccccagaatgtacacatgttgttggattggatagcagaagcaaacagggtgcagatgatggctttgttacggtgagcctaaagccagacaaagggaagagagcaaattcccaagaaaatcgtaattatttgagactgtggactccagaaaataaatctaagtcaaagaatgcaaaggatttacccaaattaaatcaggggcagttcattgaactgtgtaagacaatgtataacatgttcagcgaagaccccaatgagcaggagctgtaccatgccacggcagcagtgaccagcctcctgctggagattggggaggtcggcaagttgttcgtggcccagcctgcaaaggagggcgggagcggaggcagtgggccgtcctgccaccagggcatcccaggcgtgctcttccccaagaaagggccaggccagccttacgtggtggagtctgttgagcccctgccggccagcctggcccccgacagcgaggaacactcccttggaggacaaatggaggacatcaagctggaggactcctcgccccgggacaacggggcctgctcctccatgctgatctctgacgacgacaccaaggacgacagctccatgtcctcatactcggtgctgagtgccggctcccacgaggaggacaagctgcactgcgaggacatcggagaggacacggtcctggtgcggagcggccagggcacggcggcactgccccggagcaccagcctggaccgggactgggccatcaccttcgagcagttcctggcctccctcttaactgagcctgccctggtcaagtactttgacaagcccgtgtgcatgatggccaggattaccagtgcaaaaaacatccggatgatgggcaagcccctcacctcggccagtgactatgaaatctcggccatgtccggctgacacgggcgccttcccgggggagtgggaggagagggaggggagggattttttatgttcttctgtgttgagttttttctttctttcttttaaattaaatatttattagtacctggcttgaagcctagtgttttcataatgtaattcaatgaaaactgttggagaaatatttaaacacctcaatgtaggtacattacactcttgttgcggggaggggatttaccagaatacagtttatttcgtgaattctaaaaaacaaaaagatgaatctgtcagtgatatgtgtgtattataacttattaatcttgctgttgagctgtatacatggtttaaaaaatagtactgtttaatgctaagtaaggcagcagtcatttgtgtattcaggctttttaaataaaattagagctgtaaggaaaatgaaaagccacaaatgcaagactgttcttaaatggaaggcatagtcagcgagggtaaatcctataccactttaggaagtattaaaaatatttttaagatttgaaatatatttcatagaagtcctctattcaaaatcatattccacagatgttccccttcaaagggaaaacatttggggttctaaacagttatgaaagtaagtgatttttacatgattccagaataacacttgtattgaccaatttagacagataccagaccaattttgcatttaagaaattgttctgattatttacgtcaactcattagaattcagtgaaaagtaacagtcttttgtcacagagaatctgaaagtagcagcaaagacagagggctcatgacaggtttttgcttttgctttgcttttgtttttgaaagagtaaaagtactgatgcttctgatactggatgtttagcttcttactgcaaaaacataagtaaaacagtcaactttaccatttccgtattctccatagattgaagaaatttataccacatatcgcatatgaccatctttccatcaaatcaatgtagagataatgtaaactgaaaaaaaatctgcaagataatgtaactgaatgttttaaaaacagaacttgtcactttatataaaagaatagtatgctctatttcctgaatggatgtggaaatgaaagctagcgcacctgcactttgaattcttgcttcttttttattactgttatgattttgctttttacagatgttggacgattttttcttctgattgttgaattcataatcatggtctcatttcctttgcttctttggaatatttctttcaacacattcctttattttattatacattgtgtcctttttttagctattgctgctgttgttttttattctatttacaggatgatttttaaactgtcaaatgaagtagtgttaacctcaaataggctaaatgtgaacaaataaaatacagcaaatactc

SEQ ID NO: 62 - DNA, 1833 bp, Homo sapiens
ggcacgagtgggagtacaggactcgcctcctcagggttccctgtgctgccacttttcagccatggccacaagtgaacagagtatctgccaagcccgggcttccgtgatggtctacgatgacaccagtaagaaatgggtaccaatcaaacctggccagcagggattcagccggatcaacatctaccacaacactgccagcaacaccttcagagtcgttggagtcaagttgcaggatcagcaggttgtgatcaattattcaatcgtgaaagggctgaagtacaatcaggccacgccaaccttccaccagtggcgagatgcccgccaggtctacggcttaaactttgcaagtaaagaagaggcaaccacgttctccaatgcaatgctgtttgccctgaacatcatgaattcccaagaaggaggcccctccagccagcgtcaggtgcagaatggcccctctcctgatgagatggacatccagagaagacaagtgatggagcagcaccagcagcagcgtcaggaatctctagaaagaagaacctcggccacagggcccatcctcccaccaggacatccttcatctgcagccagcgcccccgtctcatgtagtgggcctccaccgccccccccacccccagtcccacctccacccactggggctaccccacctcccccacccccactgccagccggaggagcccaggggtccagccacgacgagagctccatgtcaggactggccgctgccatagctggggccaagctgagaagagtccaacggccagaagacgcatctggaggctccagtcccagtgggacctcaaagtccgatgccaaccgggcaagcagcgggggtggcggaggaggcctcatggaggaaatgaacaaactgctggccaagaggagaaaagcagcctcccagtcagacaagccagccgagaagaaggaagatgaaagccaaatggaagatcctagtacctccccctctccggggacccgagcagccagccagccacctaactcctcagaggctggccggaagccctgggagcggagcaactcggtggagaagcctgtgtcctcgattctgtccagaaccccgtctgtggcaaagagccccgaagctaagagcccccttcagtcgcagcctcactctaggatgaagcctgctgggagcgtgaatgacatggccctggatgccttcgacttggaccggatgaagcaggagatcctagaggaggtggtgagagagctccacaaggtgaaggaggagatcatcgacgccatcaggcaggagctgagtgggatcagcaccacgtaaggggccggcctcgctgcgctgattcgtcgagcccatccggcgacagaggacagccagaagcccagccagccccagactccagtgcaccagagcacgcacaggagcctgggcgcgctgctgtgaaacgtcctgacctgtgatcacacatgacagtgaggaaaccaagtgcaactcctgggtttttttagattctgcctgacacggaacaccaggtctgctcgtcttttttgtgttttatatttgcttatttaaggtacatttctttgggtttctagagacgcccctaagtcacctgcttcattagacggtttccaggttttctcccaggtgacgctgttagcgcctcagctggcggtgacagccggcccagcgtggcgccaccacacaccgcagagctgtccaggcacagctccgtccccagcgctcatggtgttgaaactgtctgtcatgcaccacggtgtctgtgtccacacagtaataaacggtttactgtccgcaaaaaaaaaaaaaaaaaa

SEQ ID NO: 63 - DNA, 5737 bp, Homo sapiens
ggcacgagcagcctttcaggcagggtggcaaccaactatatctgaggaccagagccattttggggcaccagagcttgtgacctctccatctccacccagctgggtccaggggccactctcagcactcacctcagcagctgacatcataaagcagacttgggaacctggaagcactctggagaacctttccctgagacatggagctttggggccgaatgctgtgggccctcctgtctggcccagggaggaggggaagtacccggggctgggccttcagctcatggcaaccccaaccacctctggctgggttatccagtgccatagaactggtcagccactggactggggtctttgagaagaggggtatccctgaggcccgggaatccagtgagtacatcgtggctcatgtccttggagccaaaacatttcagagcctgaggccggcactttggacccagcccttgacctctcagcaactacagtgtatccgggagctgagtagccgtcgattgcagaggatgccggtgcagtacatccttggagagtgggacttccaggggctcagcctaaggatggtgcccccagtgtttattccgcggccagaaacagaggaactggttgagtgggtgctggaagaggtggcccagaggtcccatgctgtgggatccccaggcagccccctcattctggaggtgggctgcggatcaggagccatctccctcagcctgctgagccagctcccccagagccgagtcattgctgtggataagcgggaagctgctatctctctgacccatgagaatgctcagaggcttcggttgcaggacaggatttggatcatccacctcgacatgacctcagaaaggagctggacacacctgccctggggccccatggacctgattgtcagcaaccctccctacgtcttccaccaggacatggagcagctggcccctgagatccgcagctatgaagaccccgcggccctggatggtggggaggagggcatggacatcattacccacattctggccttggcaccccggctcctgaaagactctggtagtatcttcttagaagtggacccaaggcacccggagcttgtcagcagctggcttcagagccggcctgacctgtaccttaatcttgtggctgtgcgcagggacttctgtgggaggccccggttcctgcatatccggaggtctgggccatagcatggctgccctgtggatgccttgtcagtgccgccagcctgaccagaggggaggtggatggcactttccagagcccaggttcttatggcatttcccagggttctgtgatttccccatgctctgcatttctaggatatttctaggacacctggattggctccatcacatcagagtggctgagggcagttgctctgtgttggtgaaattgctgtgggggtatcgggggatatggccagtaaagtattgagagactaacaaatggtgacctaatgttttgtccatgacttgcaggtcccctgacccccttactcccaggtagcactggggcaagggtttccttctgccccagcagggctggcccgtcagtcccctgcttggtagtggtgtgggggtgcagtgtggaggaaggcacgtgagtcctcactcctggccttggataccatgggtcctggcataagcagctcactcccagtgattgattagtcctccactgccctgggtgcatgcgtacacaattccctggccaagcctggctcgagcacaggaagctcatctgcgttttggctcaaggatgactgcctgctttctggaggggagggtctggaggtctttgctgcacagttcctggtcgcacatccacgttcatttaactgaaggcttgagccagtgaggggtgtttcctttttatccccatagcttttagctaaaacatccctcccgagttgaccccctggggtttcaaataacccatgtgtccctggttggggctggggagagtgagaagctgagatactgggcacagggttgtggcctccaccccagctctggtctgtgcagactcatggccaccaggaggcctgcagatccagccttcctgtcaacagcgacaggaaatctctaggttggtgagtgctggtgatgtgagcctacatcagggtgggtcctaagaaacatggcaaaccaggctgtctcattccactaactgccccctgccaccctggcacttcccagggcctggcagtatggtctgatgggcagtatggtccaataggcagcatcctctgctgcagctgggagagctgagttccagggctgtgtcctgcagtgggaccttgggcaactcctttccctatgagaagctggctcttctgagtccagggccaacgccaactggcaacctctttactcttagtcaagtggaatgtgcatgctggcatctgaatgtccattcgccaggcatggagagcaagagaaggtatgtactgcctgaggtcacatgacagtgaccaagtggagacagtaagttagatccctccctttggggagcctatattgctggagtcatacccagcctaagtgttgccctgcactatggctggaggacatttggtagaggtcacactgcagctcccagtgccccagtgtcctgccctgtgcccagccccagctgcatggactctgagctgcccctggcttcctttaaggaggctgctccagaaggaacctgggtggggagggcgaagggggtgcacaaccagggcaaggctccccacttccttagtcccccatgctcacagacctttgcctgctaaggtcctcaccagtattgccctttctgtctttctccttgtgccctttggctcttgctgtcttcagcagcatctcagggtagctgccctgacctcggagcagtctgtcgcccccctacacctcagccagtcctggcttccctgatggtctctccctcctggcctcaggcccattcctgaggaagggccttggcgagcttgtggatgttgcaccagaagagagtgcagtgttggagagtgacactgtcggggcagctggggccacaagcaggagccggcctcgggcacaactttctgcccagaaaaatgtgcagcttgactctgctgaggaaaaggtccaagccaagaggactggcaggcggggcctcaagcctgcagccactggcttgattgggccctggacgttgagcccagatgttggagccacaccagcctggatttcaatcccagaatctgcccctcaccaggatgtgaccttgggcagatgacttcacctcactcagccttggcttctaaggctgagaaatgggacttaatgcttttttattttataggatgcatgtgaggagcccatggaatgtgcctggcttggcacattgtggcatttttccttgccttcctcggagggcagacacagggaggaaggacccagtgccctcaggcgtccatctgatgcatgggaccaacataaggcaggcagggatacaaggcagtctggaaagaagggaaggcaggagtttcagtcttgggctcttgactcctcgctgttgtctagagatggagccagcaggctggtagcctggcagcctacatctcccctcagcctctcctcactatggccccagtgccttgaggcccaggccagggcagccagtggctctagctcagggaaagccaggcccacctgccctatcccctcccttgctcctgaggccaaagccagagactcgaacagcctccccaccaccaccagcatatgtcaaggagcacttgcaggcagaatgggaggaggacatggagctgatggagtccaggctgtgcaagcccctgaggtcttgagagatgtgcccactgcccgtgcagcctccttcagccagagcccagagcatagacaggagtgtaggagtccctgtttgatgtactctgggagagtaattctatctcctcttctgatagttggggaaactgaggccttgtctcacagttggatgcttttcccagttgtcagtgggtttctccatgggtctcatacagctgccttattgaaataggccccgaaccccctaaatgcaaaaaatactcttttttgctcctttacccccacctggaccctgggctattggctgctcccaatccttgccccaaacacttagctggctccccatgacttaagtgtgttctcttgtgtcctatggaatccagttctgaagaggtgggggaggacaactgtgggaaaagccctgggggcccctcccaaggccccatcagtgctctgagtaggctgtcatcagaacaaaagggctccactgctgacaaggtttgagaactgctggcttgaggtgagaacccctttaacctctgcgggacagcatgtctttccctatccaccttcgattcttttctcttttttttcttcattggctccttcttagtggattctcttctctactgccctgggcttcagcctttgtgcagtactctcgatgccctgaacacacaccttccctttgcccaggcggtgcaaacaatccacttcttcaagctccaacacaaatgctgcctcctttaggatgcctgctctgtgctctccctgcctcccctagcccatacctctgctggcaccttctgtaccatgccttcagaaaccttcttatccccctcatctctggggccccctgtggatctggcatacccaagttcagtaaatgtctatcagtaagctgatggtacatgcattttctagaatagagctgggacttcccatgtggcccacatctgacctggcagcccatgtattccggtcattagggatgggaagccatgaggacctggccttctgcccgacccaggcagccattcaagttgagcaatggccacttcgaagactcaagtgcacctgatccctgcgcaacagccacaccaggagaacaggctgtccttggcggcagtaggagcaggcgccaggtttcctggagctcttggcttcagccagcccccagccagagtcctggctaggacagtgacctgatctcctcctcatgaccttctgccctggacaagccccctgaactggatttgggactgtcaaagcaactctacccctgctctggtaggctgaacagtgaccccccaaaatggcagtgtcttaatcacctaaaccttaacatgtgactatattaccttcacatagcaaaatggactttgcagatgtgattaaggatcttgagatggaaggagtatcctggatttttcaggtaaactgagtataatcacaagggcctctgtaaaggaggcaggagtgtcagagtgacggaagaaaatgtatgtaacaatggaagcagaggtcagagtgatgcaattgctggaggaagagccatgagccgaggaatgcagacagcctcttctcctctggggcctcaagaagaatgcagtcctgccaataccttgattttaagccctgtgaaactgatttcagattgctgacctccagaacagtaagatcataaatttgtgttgttttcacatgtgtgaaaacacatgtgtgataatttgttacagcagccacgggaaacgaatatagattgtggtgcccaaattagagtgctgctgtaacacacgcctactgattgaagtggctttggaattgcaacgtggaaatgggcagaggctggaagaattttgagagtcatgataaattgccttaaccaccaaaaa

SEQ ID NO: 64 - DNA, 5493 bp, Homo sapiens
atggcagaaggtgtgaatgagccttgtttcccgggggactgtggcatatttgtcactaaagtggacaaaggaagcattgctgatggccgcttaagggtcaatgactggctgctgagaatcaacgatgtggacctcatcaacaaggacaagaagcaggccatcaaggcgctcctcaatggggagggggccatcaacatggtcgtgcggcggaggaagtccctgggtgggaaggtggtcacgccgctgcacatcaacctcagtggacagaaagacagtggcatcagtctggagaatggagtgtatgctgccgctgtgctgcctggaagccctgccgctaaagaagggtcccttgctgtgggagacaggatcgttgcgatcaatggcattgcactggacaacaagtctctgaatgaatgtgaatctctgctgcggagctgccaggactccctgaccctgtccctcctgaaggtattccctcagagctcctcgtggagtggccagaacatttttgaaaatatcaaagactctgataagatgctgagttttcgagcccatggcccggaggtccaggctcataacaaacggaacttgatacagcacaataactccacgcagacagacatcttctacacggacaggctggaagacaggaaggagccaggccccccaggaggcagcagctcctttctgcataagccattccctgggggacccttgcaggtctgcccccaggcctgtcccagtgcctctgagcgtagcctgagctccttccgctcagatgcctctggggaccgtggctttgggctggtggacgtgcgtggccggcggccactgctgccctttgagaccgaggtgggcccctgtggggttggggaggcctccctggacaaggcagactctgaaggctccaacagcggcgggacctggcccaaggccatgctcagctccacggcagtgcctgagaagctctctgtttataaaaagccaaagcaaagaaagtccatctttgaccctaacactttcaaacgcccccagacaccccccaaaatagactacctgcttccaggtcctgggcctgctcactctccccagccctccaagagggcggggcctctgacacccccaaaacctcccagaaggagcgactccattaagttccagcacaggctggagactagctccgagtcagaagccactctggtgggcagctccccatccactagtcccccgagcgccctgccccctgacgtggaccccggggagcccatgcacgcatcaccccctcgcaaggccagggtccgcattgcttccagctactaccctgaaggagatggggactcctcccacctgccggccaagaaatcctgtgatgaggacctcacctcccagaaggtggatgagctggggcagaagcgtcgccggccaaaatctgctcccagttttcggccgaagcttgctccagtagtgattcctgctcagttcctggaggaacagaagtgtgtcccggccagtggagaactctccccggagctccaggagtgggcaccttactcgcctgggcattccagccggcacagcaaccccccgctataccctagcaggccgtctgtgggtactgttccccggagtttgacccccagcaccactgtgagctccatcctgcggaaccccatctacactgtgcgcagtcacagggtcggcccctgcagctctccacctgcggcccgagatgctggcccccagggtttgcatcccagtgtccagcaccagggacgcctgagcctggacctgagccacaggacctgcagcgactactccgagatgagagccacccatgggtccaactcactgccctccagcgcccgcctgggttcttcgagtaacttgcagttcaaggcggaacgcattaaaatcccatcaacaccaagatatccgcggagtgtcgtgggctccgagagaggttcagtgtcacattctgaatgcagcactcctccacagtcacccctgaacatcgacaccctgtcctcttgtagccagtcccagacctcagcctccacattgcccagaatcgctgtcaaccccgcgtccctcggggagcggagaaaggacaggccttatgtggaggagccacgccacgtgaaggtgcagaagggctcagagccgctgggcatctccatcgtgagtggagagaagggcggcatctacgtctccaaggtgaccgtggggagcatcgctcaccaggctggcctcgagtatggggatcagttactggagttcaacggcataaacctgcggagcgccacggagcagcaggcgcggctcatcatcgggcagcagtgtgataccatcaccatcctggcccagtacaacccccacgtgcaccagctcagcagccactcccggtccagctcacacctggaccctgccggtacccactccactctccagggcagtggcaccaccaccccggagcatccatctgtcatcgacccactgatggagcaggacgaggggcctagcacccccccagccaagcagagcagctccaggattgcgggagatgccaacaagaagaccctggagccacgcgttgtcttcatcaaaaagtcccagctggagcttggggtgcacttgtgtggtgggaacctgcatggggtgtttgtggccgaggtggaggatgacagtcctgccaagggtcctgacggcctcgtgccaggggacctcatcctggagtatggcagcctggacgtgcggaacaagacagtggaggaagtctatgtggagatgctgaagcccagggatggcgtccgcctgaaggtgcagtaccgccctgaggagttcacgaaggccaagggcctgcctggtgacagcttctacatcagggccctgtacgaccggctggcagatgtggagcaagagttgagctttaagaaggacgacatcctctacgtggatgacaccttaccccagggcacgttcgggtcctggatggcttggcagctggacgagaatgcccagaagatccagcgcgggcagattcccagcaaatatgtgatggaccaagaattctccaggaggctcagcatgtctgaagtcaaagatgacaatagcgccacaaagacgctgtcagcggctgcacgccggtccttttttcggaggaaacacaagcacaaacgcagcgggtccaaggacgggaaagacctgctcgccttggatgccttttccagtgactccattccactctttgaagattcggtgagcctggcctatcagcgggtccagaaggtggactgcaccgctctgaggcctgtcctgattctggggcctttgctggacgtggtgaaggagatgctggtgaatgaggctcctggcaagttctgcagatgtccccttgaggtgatgaaggcctcccagcaggccattgagcggggtgtcaaagattgcctgtttgtcgactataagcggagaagcggccatttcgatgtgaccactgtggcgtcaataaaggagatcacagaaaagaaccgacactgcctcctggacattgctccgcacgctattgagcggctccaccacatgcacatctaccccattgtcatcttcatccactacaagagcgccaagcacatcaaggagcagagagaccccatctacctgagggacaaggtgactcagaggcattccaaagagcagtttgaggcggcgcagaagcttgagcaggagtacagcaggtacttcacaggggtcatccagggaggagccctgtcaagcatttgcactcagatcttggcaatggtcaatcaagaacaaaataaagtcctgtggattccagcctgcccgctctaggagaatgctgtgctgtggatgactgcagctggccgcctgaggggacgccagactcagctcttttctagcgactgaaagtagaagtctgtctgtctatgaacatgcgggggaaggatccggaaccaggacccagaagcacctcctttgtagacagagggccacggctgcgtgcgatccaggcccaggcccacacactctgcccgtgtcacacgtgtgctttaacacaaaacagataacactaaagacgggttcagcacccacctttctttagccagctgatcagagatgctgcaaagagaacctttcggatcactcgtttacaagccttttctaagtatttggtggtttatgtttacttgaacggctccatgttgccggtgcccagcccctgtcccctctgtcaaccccctgtcgctttggtgttggtttcgttcccgtcttcagcaaaacgaccttggaacctcaatgggggctgctttgctttgggaggttcttgttggtgggaccagagctttgacaaacctcctgctccttggtggcacctctcctggaaggacatcacaactccaggtgctcagactgcctgtggcagcagaaccagtgcctttggcattttcctcccacaatggggaaggtgactttggcattcttacaaactcgtctctcggcctttctctcctgccttccacagcctctcgtttctcctccatctgtgcttattacttgaggactgtgtctgctccgtgagagctgcgtgggcagggctgcagtggggtccaggtggtgttcagctgtgctgatgcctgccattgggtcctccttaggctctgtaagtcgtgacagccttcatcagtgcaatgtttgcagggtaattcttaaactttttagagggtggcaggtacatcagttctttttgatatgaaaacattcatgtttcagacattgaattgagagcttttaggggaagcataatggttattgtcactatcaacagtctaaaaagaaaaactgaggtctttttaatcttgattacagcactcacggcatgcaccctactcagtgtgggtgtcttcgtttgggggctttttttttttttgcacttctgaggctagatatgtctggctgaagatttgatgtggttcctccttaagctatgcgtcctgttaataataggtactgtactgggctctgtgtaagtgtcgttggggtaggacctatattttaatactgttcctaacatttcattttactagcgagaaatctttgatttcattttattctttgtaattctagacactagattgtagtttagccataactgatgttttttaaaaagggatatattttcttgcacagttgttcaaaaaagagacaagtttcagtcctcaatgctgtcctttgttttacaggtacaagttttctagctcagacaaactatgaaaaactgtagactattctcaaggtattaactcgcagaccctctgggggtaggggctgttttctaagttacaggcagagtgggactgagatggtacagtgtgcacagacaggtactgagctgacagactgggattttctgtactaaaatgttactttgtatcaaaagttaaacaggctttagtacaacaaataaaggtcaatttctgt

SEQ ID NO: 65 - DNA, 7785 bp, Homo sapiens
ctcactgtccctggaatcttcaagggagttactgcattacatcatcagaaacaaggcatttctatattactatggaaagatttcgtctggagaagaagttacctggtcctgatgaagaagctgttgtggatcttggcaaaactagctcaactgtgaacaccaagtttgaaaaagaagaactagaaagtcatagagctgtatatattggtgttcacgtcccgtttagtaaagagagtcgtcggcgtcataggcatcgcggacacaaacatcaccaccggaggagaaaagataaagaatcagataaagaagatggacgggaatctccttcttatgatacaccatcccagagagttcagtttatccttggtactgaagatgatgatgaagaacatattccccatgatctcttcacggaaatggatgaactgtgttacagagatggagaagaatatgaatggaaagaaactgctagatggctgaaatttgaagaggatgttgaagatggcggtgaccgatggagtaaaccttatgtggcaactctctctttgcacagtctttttgaactaaggagttgcatcctcaatggaacagtcatgctggatatgagagcaagcactctagatgaaatagcagatatggtattagacaacatgatagcttctggccaattagacgagtccatacgagagaatgtcagagaagctcttctgaagagacatcatcatcagaatgagaaaagattcaccagtcggattcctcttgttcgatcttttgcagatataggcaagaaacattctgaccctcacttgcttgaaaggaatggggaaggcctttcagcctcccgccactctttgcgaacaggtctgtctgcctcaaacctttccttgagaggagaatcacctttatctcttcttctcggtcatcttcttccttcttcaagagctggaacccctgcaggctcaaggtgtacaaccccagtacccacccctcaaaacagtcctccttctagccctagcatcagccgcctgacctccagaagttcccaaaagagtcagcgtcaggccccagaactactggtttcacctgccagtgatgatattcccacagtagtaattcatccgcctgaggaagacttagaagcagcgctgaaaggcgaggagcagaagaatgaggaaaatgttgacttaactccaggtattttggcctctccccagtctgctcctggaaacttggacaatagtaaaagtggagaaattaaaggtaatggaagtggtggaagcagagaaaatagtactgttgacttcagcaaggttgatatgaatttcatgagaaaaattcctacgggtgctgaggcatccaacgtcctggtgggcgaagtagactttttggaaaggccaataattgcatttgtgagactggctcctgctgtcctccttacagggttgactgaggtccctgttccaaccaggtttttgtttttgttattgggtccagcgggcaaggcaccacagtaccatgaaattggacgatcaatagccactctcatgacagatgagattttccatgatgtagcttataaagcaaaagacagaaatgacctcttatctggaattgatgaatttttagatcaagtaactgtcctacctccaggagagtgggatccttctatacgcatagaaccaccaaaaagtgtcccttctcaggaaaagagaaagattcctgtgtttcacaatggatctacccccacactgggtgagactcctaaagaggccgctcatcatgctgggcctgagctacagaggactggacggctttttggtggtttgatacttgacatcaaaaggaaagcaccttttttcttgagtgacttcaaggatgcattaagcctgcagtgcctggcctcgattcttttcctatactgtgcctgtatgtctcctgtaatcacttttggagggctgcttggagaagctacagaaggcagaataagtgcaatagagtctctttttggagcatcattaactgggattgcctattcattgtttgctgggcaacctctaacaatattggggagcacaggtccagttctagtgtttgaaaaaattttatataaattctgcagagattatcaactttcttatctgtctttaagaaccagtattggtctgtggacttcttttttgtgcattgttttggttgcaacagatgcaagcagccttgtgtgttatattactcgatttacagaagaggcttttgcagcccttatttgcatcatattcatctacgaggctttggagaagctctttgatttaggagaaacatatgcatttaatatgcacaacaacttagataaactgaccagctactcatgtgtatgtactgaacctccaaatcccagcaatgaaactctagcacaatggaagaaagataatataacagcacacaatatttcctggagaaatcttactgtttctgaatgtaaaaaacttcgtggtgtattcttggggtcagcttgtggtcatcatggaccttatattccagatgtgctcttttggtgtgtcatcttgtttttcacaacattttttctgtcttcattcctcaagcaatttaagaccaagcgttactttcctaccaaggtgcgatcgacaatcagtgattttgctgtatttctcacaatagtaataatggttacaattgactaccttgtaggagttccatctcctaaacttcatgttcctgaaaaatttgagcctactcatccagagagagggtggatcataagcccactgggagataatccttggtggaccttattaatagctgctattcctgctttgctttgtaccattctcatctttatggatcaacaaatcacagctgtaattataaacagaaaggaacacaaattgaagaaaggagctggctatcaccttgatttgctcatggttggcgttatgttgggagtttgctctgtcatgggacttccatggtttgtggctgcaacagtgttgtcaataagtcatgtcaacagcttaaaagttgaatctgaatgttctgctccaggggaacaacccaagtttttgggaattcgtgaacagcgggttacagggctaatgatttttattctaatgggcctctctgtgttcatgacttcagtcctaaagtttattccaatgcctgttctgtatggtgttttcctttatatgggagtttcctcattaaaaggaatccagttatttgaccgtataaaattatttggaatgcctgctaagcatcagcctgatttgatatacctccgttatgtgccgctctggaaggtccatattttcacagtcattcagcttacttgtttggtccttttatgggtgataaaagtttcagctgctgcagtggtttttcccatgatggttcttgcattagtgtttgtgcgcaaactcatggacctgtgtttcacgaagagagaacttagttggcttgatgatcttatgccagaaagtaagaaaaagaaagaagatgacaaaaagaaaaaagagaaagaggaagctgaacggatgcttcaagacgatgatgatactgtgcaccttccatttgaagggggaagtctcttgcaaattccagtcaaggccctaaaatatagtcctgataaacctgtgagtgtgaaaataagttttgaagatgaaccaagaaagaaatacgtggatgctgaaacttcattatagaattgaaccaagaggcattatacatatagatatatacatatgtaatgtgtgcgtatcatgtcactatatataagaatattgtatgtcatgctgtttatgtgtgactaccgggtttttaaaagtagtgtctggagtttgtaatgagcaccgtggagactatgtatttaatgaaatgctctctttgaagtgaggtacatggttcttaactattcaaatatttattctgttagaaaaaaaaaattttctgttttgcaatagaaggatgtggagaaatgctttcagtctacttttcttaaatctctgttcatcagtggcaattcgtaaaaaccttaagtgatactttgtttatatgtttataatttttaggtgtttcctgaaattttcacatattatttcacttttgttagtgctttatgggaagaatagggagtctataccagtgctgtgggaaaaatggtaacatttcagggcttctctatttgtgtttcatttctgtagatgtccatcgtgtttcactaactggcgttttcttagccatagagatgactgtagaacaatagaaactttaataatgatagtttttaacttttatgtttaaattttttttaaatcttaaaaccttcatatctaggtatccattgtgacagacaagtaaaattgcaggtgatttgataattaagcacccataccatttataacttctgaatttaaaaagttatacaatgccagtttgcaatagttgattttgatgcctttgtagaatattttttctgaatccttatgctcttttaaagccaatgattcccactctgttctctgccttgtctctctttgtcttaaaatgctttagtttccatcaggttcaagttcttgactattattctcttataagtagtaggcgtaaataatcaggagttagaattctctcagaagggtctatgatcagtattactttattaagaattacctttcattttctctttatgttattctttcacttttgtagattacatttaatagcttgttacctgtgattttattttaaaatatttattttgatatgatgcttaaatattatataaacatttggaaaagtaacaaatagagtaaattgttaatgtaaatagttggtgcttactttcatttatgtttattatcttaaagcaattgatagattttacatctttgatataaagcactgccatatttatattttaaaaggaaattagacattttatatgtagctcagattaatgacatttttattttgtgtattagtttttgcttttctgagctttttaaagtctaacaaatctttttagtcatcttttatatacttttagttccacatgaaataaatgttgttaagcctgtaggactggatgaatggggttgtgaaactgatttgacaagagaataatttacaaaaatcaaatgagtattgagaagccacagaaatatcaaaaatggtgacatcactattaggatgaaaattttatgaaattccaatgctccctttaaccatataattaaattacaaaggtatacataattaatctaataaaggatcatgaggaatgccaaaagctgaaattttagcaagtctggtgttttaaattcattataaactatttattaactaatgtaatgtcctcctctaagaccatattgtaagagtcttgttaaaatgatggattcaacttctgcctcggatgagaggttggaaatgtagctgcttttctttagaaaatatgtagctgtcatcatttggtactgcctaaaaagagttagactctattggcaattgatagagtattacccacggtgcttattattgtttatgagcttccattgtaatgattcctttttatttgtagcagcataattatttccaaagaccccagtatttgctgctatttttaaaactcccctgatgtacctgaacaagaggatttcctcacatcatttccttgtgtctggacatcaggggtaacaactgtacttactttacaggaagaaattttaaaactgaaaactacctgggatcatagtgtttctgtgattttatttaattgtgtatagtaattatccagtgccagaaaaaccgtcacttgcaaaatactttgcactcaaaatgtttttacaatgcttctaaatgttactggtttctgctttcttttgactacttgactgacaaaatgatctgactactccatttaagagcaaaggtaactcatgtttaagtaattaactgcttgttttaagtgattatatttcttccactgtttttgaaaaataatcaaagatagcattcattgagagacagtgacagatataatttactacatatattgatttttaaataaagttgccttaaataagtgtatgtaagcagtagtagttgctatgtactgatttacctcaaggtgcaaaataattaaacctgtacatattccatttacaaaataaattcagccctgcactttctttagatgccttgatttccagaatggagcttagtgctactgaataccctggccacagagccacctcaggatattcttttctccaccctagtttatttatttatagatatctgtttacaaagtctgtagtaaatcctgatgctgaccatctgaaatgtactttttttctgaatgctgtttcaatctaaaatagcagcttttgagaaaacaatgatgtaaattccttatgataaaaggatgattctatatattctttaatgatattaaatatgccgaagccaagcacacagtctttctaaagtgtgtgtatgtttgtgtgaatgtgaatgatactgatcttatatctgttaaaagttgttttaaaaagctgtggcatcccattgttcatatttgccaagtcttctgtaaagatgtctaggacgaaatattttatgtgctaatgcatgtatttgtaaaccagatttgtttaccactcaaaattaacttgttttcttcatccaaaaaagtttatgtcttccacgtacttaaattttctgtgtgggtataatatagctttctaatttttttctttcacaaaggcaggttcaaaattctgttgaaagaaaaatgctttctgaaactgaggtataacaccagagcttgctgtttaaaggattatatgatgtacatcagttctataaatgtgctcagcagtttaacatgtgaatcctgttttaaagtgctcagatttcaactgtgtaagccattgatataacgctgtaattaaaaatgtttatatgaaataacttaatgttttaaatttatttatgtagatcacatcatttttatcagtatgcagtgcaaatatgtgaaatgtcttttggtttattccaacaattatttattttagaaagtaagtttaaagactttaaggacattcaaagtttaaaatagtgttcaaattgcaaaatttggcaatcttcatataaattggtttcttttctaacttttcaaaaactaacattaaatgtcaattataggaaaacatagttggaaatgtaatcatcccaaagatcatttttaaaatgaaatttaattagcacatattgaacatttgacttaattgttaaaccccagttttgttttgtttttttaatcagatttttgcacactgattagtttttgtgttgtggcttttgttgctttattattcaaggtttttttttttctttccccatgggggagattgtcttccaatgtttaactacgtttaaataaataaaaattgaattttattgttcatttatataaaatctgataccttgatgtaatttcacaatacagttccaatttttatggcttttataattacaatgatattttcttctataataaaatccaaagtaaacatttaaattgtagaactgatatttttcatttatatgaagtataagcctctactgggtctatattgtgaatcatcctgcctttcaaatttgtttcataattgttagatgaaaactatttttttggagatgttactgaagttgattgagcaataaaagtctacttaattaaaaaaaaaaaaaaaaaaaaaaaaaaaa

SEQ ID NO: 66 - DNA, 2159 bp, Homo sapiens
tctttccgtcccgggcagccagcgccagtcggagccagcgcgagcgccgccgccatcactgccgctgccaagtcctccacccgctgcccccgccatgtctgctaccgctgccacggccccccctgctgccccggctggggagggtggtccccctgcaccccctccaaacctcaccagtaacaggagactgcagcagacccaggcccaggtggatgaggtggtggacatcatgagggtgaacgtggacaaggtcctggagcgagaccagaagctgtcggagctggacgaccgtgcagatgcactccaggcgggggcctcccagtttgaaacaagcgcagccaagctcaagcgcaaatactggtggaaaaacctcaagatgatgatcatcttgggagtgatttgcgccatcatcctcatcatcatcatagtttacttcagctcttaaatccccgaggagtctgccctgcctagagaagggcctctcccccaaccctcagccgttcctccacctctcagccatatctttcagccccccctcccctggatccgtgtgtgtgtgtgtccgtgtgtgtgtccccctgtaaatagccagctgttatttatacatatataatattatatatatttggtctgtttgtagttttattactagatgatttttccggttgtccttaacaccccttcctgaggttcccttcacccctctctcttgccttccttccctttccctttcttcctgactagccccaagtcccttcatttgcatctgctatgcaatagtccctctcctttccttcttcttccctcagatttagctgatccttcctcccaccctggccttcctttcctctttcctcctcactctccccgtcatgctccctctgccccgccctcaaaaaaaaaaaaaaaaaaaaaaaaaaaaaaaaccaccagcacctgtccaggcttccttaggtacatcttctttgtatccattgggaggctctgagactggccccacttggtcctaaaaatcccaaggtctttgggagcgtccagcatgttaattagcgtatcattacatactgctatccctttccatttctttttgttccatcactcttctctcaacctgtgtttctttttttactgaggagttagtccccattagttcttgtatcacattttcatttgcacgacattactcgcaggtggtggggagcctgggcttttggggaaccaggctgctctggtccccagcattgcctcctcctagcccctctagtccagtttgcctcccttaccctcattttccaaacctcttgtaccctcctctccctcccccagtggtatgtaagtgtcttgaagttcagtatgttatgatggaccaataattctgcccttcgggtttctccctacattcctgctccccagttttcatgtggggtactcaactgacattcccatggggtttccctcccatctgcctgatccacctcctcctcccaccacaagatcaattgttggccacaattgatctcttgtagaggggtggctaccagtgtgtgtgtgggggtcatcactgccttggggaggagtggggcagggcagagaatccccccaattcctgcctgaaatctctggcctcacccctgctgggggttggactgaaaaccctcctccccaatttggggggtgttgccccatcactgcccagctcctctgactgccccccctgaatttagggtgggggtactagtcactgccaatgtgtgtatgggacttgctggaaaacggggatgcttgcccctctccaggactattgagcccagagagagctgtcctctcattgggtgaactgattgaggaagggtctattgtctttttaaatggcacaattttaagggtttgagggtacagtcccttaacctgccacgggagggggcccccaaactttcttcccccccacacttctggttttctgtgtggagggggagcagggatatctaagctgtggtgtgaaagggtaggagagatgctggaggtgggggtgctgtgttctagaccccccatattatcccagtgtcccctgcccccctcttcccccaccccatgcccccaattctgtggcgcatccagattgtgaaaatgtacaataaatgtgtaatgagtaaccaggt

SEQ ID NO: 67 - DNA, 2780 bp, Homo sapiens
tttttttatgaggctgggaaaatagaacgaggaagtggtgacgcactgggctctcacgaatacaactagaagctgcaacgactgtgtggctctatcgattcgggagaggtccagaccggaaatggtcgtttccatggtaaccctgagcaggttgcctgggagatgacctctttcgggtctctttgaatctccgctgtagcgtcacctggaaggcagatctaacagagaacctggactgtctcctatcatgattcccgggaaatatcgctctgtttctggccgggctgcgaacaacgtgaactgcgggcttcatctggttattcaaacatcatcgcttcctgaaaaaaacaaagttgaattcaagctaaataaagacacatcgtcattccccggtagacttttacaacatgaccttgaaagaaactactcaagtaggcaaggtgatcatattaatttggtgagctcatcattgtcatcatttcctattcttcaacgttcttctgaagagaaaattctttactcagacaggttgagcctagaaagacaaaagctgaccgtatgtcctatcatcaatggggaagaccaccttcgtttgttgaactttcaacacaattttataactcggatacaaaatatttctaatctacagaagttaatatcgttggatttatatgataaccagattgaagaaattagtgggctttcgactctgagatgtcttcgtgtccttctgttggggaaaaacagaatcaagaaaatctcaaatctggagaatctaaaaagcttagatgtcttggatcttcatggaaatcagattaccaaaattgaaaatattaatcatttgtgtgagttgagagttttaaatcttgccaggaactttttaagtcatgttgataatcttaatgggctggattcactaactgaacttaacttgcgacacaatcaaatcactttcgtgagagatgtggataatttgccctgcctccaacatctctttctcagctttaacaatatatctagttttgacagtgtttcctgccttgctgactcttcttccctctcggacaccacctttgatggcaatcccatagctcaagagtcatggtacaaacacactgtccttcagaatatgatgcagctgcgccagctagatatgaagagaatcacggaagaagaaaggcgtatggcatctgttttagccaaaaaagaggaagagaagaagcgggaaagtcataaacaatctttgcttaaggagaagaaaaggttaacaattaacaacgtagctcgacagtgggacttgcaacaacgagtagccaatattgctacaaatgaagatagaaaagattctgactctcctcaggacccctgtcagattgatggaagcaccctctctgcattcccagaggaaacagggcctctagactcaggactcaacaatgctttacaaggtttatctgtcatagacacataccttgttgaagtggacggggatacactttccctatatggctcaggagcactggaatctctggataggaattggagtgttcaaacagcaggaatgatcacaacagtctccttcactttcatagaatttgatgaaatcgtccaagtgcttcctaaactgaagattaagtttcctaattctctgcaccttaaattcaaggaaacaaatcttgtaatgctgcagcaatttaacgcactagcccaactccgtcgtattgaccagttgacaattgatcctcaaggaaatccagttgtcaattttacactctggaaatactatgtactgtttaggctaagccatttcagtatgcagaaaataaatggaacagaggtgacacagaatgatatgataatggctgaaaggctctttggaatcctagcacatgtagcatcttctgagttaccccagtatcgtctgatttccattctgggtgatgccaggaaaaagcaatttcggtatctactagaatccaaaggaaaaaaacctggtattatcaacgaagaaaataatgacagcaaaagacttgtaggagaaaacacaaatcgtgctacattaaattatactacaagagacttttataatgaaaagctagaggaaataaaggaaaagaagaaattctgtaaaacatatatagaagaccttgtgaaggaagccacagaaatcaacatgaaaaatgaggctttgcagaagctttggccacagatgttcattgagctcgttagggatgcagtcatagaaattcgcaataaaaattcctatatgaagctctgcctacagcagataacagaccaaaaataaaaatggcctttagttacagttgattttggcagttttattttttgaaggttgaaaatatgcaggttatacatgttaaaacaacaacaacactatcctataaactagaaagactagtataaaagcattattgcccactgttctcatagctaaaagttaagaaggaaagaaggaaagcaggagaaaggaaggattaattgcctgtatgtgaggaccaaacaacctttgggaactaaacagttttcagagatggcgtggcactgcatccttggttcttgctttgattggtgccctgctatagcccaaagcacgtagtatttgctgatgattcagcatgagctgcatctacctacttttagctgataattttcagttatttccctttttattttatgtcatgatttcaaagccaaaaatatgttctttttatgagtgaagaataaacttactaacaaattagtcaaaaaaaaaaaaaaaa

SEQ ID NO: 68 - DNA, 2617 bp, Homo sapiens
caagaagttctggagataaaaaaaatacgagtgatagaagtagcaagacacaagcctctgtcaaaaaagaagagaaaagatcgtctgagaaatctgaaaaaaaagaaagcaaggatactaagaaaatagaaggtaaagatgagaagaatgataatggagcaagtggccaaacatcagaatcgattaaaaaaagtgaagaaaagaagcgaataagttccaagagtccaggacatatggtaatactagaccaaactaaaggagatcattgtagaccatcaagaagaggaagatatgagaaaattcatggaagaagtaaggaaaaggagagagctagtctagataaaaaaagagataaagactacagaaggaaagagatcttgccttttgaaaagatgaaggaacaaaggttgagagaacatttagttcgttttgaaaggctgcgacgagcaatggaacttcgaagacgaagagagattgcagagagagagcgtcgagagcgagaacgcattagaataattcgtgaacgggaagaacgggaacgcttacagagagagagagagcgcctagaaattgaaaggcaaaaactagagagagagagaatggaacgcgaacgcttggaaagggaacgcattcgtattgaacaggaacgtcgtaaggaagctgaacggattgctcgagaaagagaggaactcagaaggcaacaacagcagcttcgttatgaacaagaaaaaaggaattccttgaaacgcccacgtgatgtagatcataggcgagatgatccttactggagcgagaataaaaagttgtctctagatacagatgcacgatttggccatggatccgactactctcgccaacagaacagatttaatgactttgatcaccgagagaggggcaggtttcctgagagttcagcagtacagtcttcatcttttgaaaggcgggatcgctttgttggtcaaagtgaggggaaaaaagcacgacctactgcacgaagggaagatccaagcttcgaaagatatcccaaaaatttcagtgactccagaagaaatgagcctccaccaccaagaaatgaacttagagaatcagacaggcgagaagtacgaggggagcgagacgaaaggagaacggtgattattcatgacaggcctgatatcactcatcctagacatcctcgagaggcagggcccaatccttccagacccaccagctggaaaagtgaaggaagcatgtccactgacaaacgggaaacaagagttgaaaggccagaacgatctgggagagaagtatcagggcacagtgtgagaggcgctccccctgggaatcgtagcagcgcttcggggtacgggagcagagagggagacagaggagtcatcacagaccgaggaggtggatcacagcactatcctgaggagcgacatgtggttgaacgccatggacgggacacaagcggaccaaggaaagagtggcatggtccaccctctcaagggcctagctatcatgatacgaggcgaatgggtgacggccgggcaggagcaggcatgataacccaacattcaagtaacgcatccccaattaatagaattgtacaaatcagtggcaattccatgccaagaggaagtggctccggatttaagccatttaagggtggacctccgcgacgattctgaaaatgagctctctgccaaggttttaagataatttattgaaatctcctgtaaactttacttgactacttatgaagaggacctctgacttgcttgagagttctgtcagacttttctttttaaaaatttaacatgattgcttttctcaattttggagaagatgtttaaatagttctgttgtaacttttaatagttttgtgtatcattcaactttttttcttgcagcaccgaggcacatttgaaaagatggaattgaagtcgttttgtttaacgctgtgtgaatataaagagtagtttgcagctgtgtggtagtggtttaatttgcagccttagctctgtggtgtctggctctagagttacttctttttaccaagcattttcagcctccattttgaaggctgtctacacttaagaagtcttagctgtctaatttttagagaataagattgttcattgcatttctgagtattatgtaacctatttttgcagaaggtactgttacattaagtgcatctgtgtatcctggtttaaaaaaatgtaatcttttttgaaataaaccttcatattctgtatagttgctaaagtgttgagaacctttttaattgtaaaatgagaaccgattttcagtttagtgtagcagcacacttgttcaggtttgcatggtatgaaaccaaatagattcatgaaaccttggccatgaggtttgtttcacaaggttcttagaccgagttgtgcaggtaagtgcacttttaggtaatctgcactgtttgtttgatggataaattccatctctgggaattgtgtgggtattaatgtttccatgttcccaactatgttgagaagtggaaaaaaacccaggttctagatgggtgaatcagttgggttttgtaaatacttgtatgtggggaagacattgttgtctttttgtgaaaataaaaatccacacctgg

SEQ ID NO: 69 - DNA, 2240 bp, Homo sapiens
ccccgcgggctgcagcgagccaggcatgctcactggcgcaggcccggcccgcagcccgagcaggaagcgccggcgtaggcggccccctgcgctgccagctggagccgggcggagccagcgccccggcgcagggtggctctgccagtccccgcgcgcctgggcggccgcacacgtgtccaggcgtcacgtccgcgcgcgcccccggggcttgcgtcagcggctgttccagaagcgggtgggccagggctctgcgcaccgctggggttcggggcccgggacgccgccgggaggagggcaccgcgcggggtccgacgcggaggcgtgctcggaacgccgggggctgcggagtgcatcagcgcggtccagccctccgcctgccgggcgccgagcgtctccgccgcccggacctgggctgggcgccgtggcgttgcctcggagctcgctgcccgcggggcgcgcaccgccttgacccgggcggccccgcggcaggcaggcgcccgcagttccatggttggttcggagcgcgatgagccgcccgtcctccaccggccccagcgctaataaaccctgcagcaagcagccgccgccgcagccccagcacactccgtccccggctgcgcccccggccgccgccaccatctcggctgcgggccccggctcgtccgcggtgcccgccgcggcggcggtgatctcgggccccggcggcggcggcggggccggcccggtgtccccgcagcaccacgagctgacctcgctcttcgagtgtccggtctgctttgactatgtcctgcctcctattctgcagtgccaggccgggcacctggtgtgtaaccaatgccgccagaagttgagctgctgcccgacgtgcaggggcgccctgacgcccagcatcaggaacctggctatggagaaggtggcctcggcagtcctgtttccctgtaagtatgccaccacgggctgttccctgaccctgcaccatacggagaaaccagaacatgaagacatatgtgaataccgcccctactcctgcccatgtcctggtgcttcctgcaagtggcaggggtccctggaagctgtgatgtcccatctcatgcacgcccacaagagcattaccacccttcaggaagaagacatcgtctttctagctacagacattaacttgccaggggctgtcgactgggtgatgatgcagtcatgttttggccatcacttcatgctggtgctggagaaacaagagaagtacgaaggccaccagcagttttttgccatcgtcctgctcattggcacccgcaagcaagccgagaactttgcctacagactggagttgaatgggaaccggcggagattgacctgggaggccacgccccgctcgattcatgacggtgtggctgcggccatcatgaacagcgactgccttgttttcgacacagccatagcacatctttttgcagataatgggaaccttggaatcaatgttactatttctacatgttgtccatgatgtgacttccgtaaaccttcaaaattatttgggcatactgctctatgtttaataaaggtttttatagatgttttattccatatgtcttcacaagtcaggacccacaattacccgtgttttgtttgaacagcagtgtcccatctggcttcgacccaacaaagttcattaacctgggatgaatggggttggcctgttggtgatttggatgctgttctgtgatctaaaacaactcttattgaattgtatttactccctaaacaacacttgacaggctgttgcacagggcttctatagatcagtgtgttaggaatgggaggccccttcctgcctgccttcccatattggtcccttgacattgacaaaagcacagtgactgtcagcagattcctttacttttgtttgtgggaggtaggaattgttttaatgcattttaaacagtgtttctgaaattggatggctggctaatagacactgaatcacccggagtgcttatcttaaaattgcagatttagggagcctgccaatttaacagtctcatcagtgatctttcaacagtaatgtttgagaattactgggttaaattgtggaaagggtccagattttaaaggtgctttaaggttgccctctgccgatactgtttgtctttctactgtttcatcccctaacttcccccaaccctcaaattaaaactagaactatagatccacatgaacgcacgcctgagatttggccactcacc

SEQ ID NO: 70 - DNA, 751 bp, Homo sapiens
tattttacaatagcaaccaactccccagtttgtttcaattgtgacatctagatggcttaagattactttctggtggtcacccatgctgaacaatatttttcaatcttccaaacagcaaagactcaaaagagattctgcatttcacatcagttcacaagttcaagagtcttccatttatcttagcttttggaataaattatctttgaggtagaaggacaatgacgaagccacttaattccttgtgtctgcataaaagcagatttattcatcacaacttcatttatgtgaataaagcagatgatgataaaatgttctcttattcttgtttaatcagtagtggtagtgatgccagaaacttgtaaatgcacttcaaaaccaattgtggctcaagtgtaggtggttccccaaggctggtaccaatgagactggggtttgggaattagatggtcatcatccctcctgctgcccagcaggggtcagtcatttttcatgagggatggactaagctcaaagaaggaagctgttgctggcaggtgcttctcagaagtctggcacatctgggtatttcttggctaaatcttctcattggcctggagcatctcttcacatttttttctagagagcctggcactttttttttccccaacaacctgaccattttattctcttagtctaaggcttcttggggtaaaagaaaaggcctgaaatacaagatcaccctttttgataggtggttccttacggaagtaaa

SEQ ID NO: 71 - DNA, 4598 bp, Homo sapiens
gagccggagcccagtgacaggcgacggcctcttgccgccccggaccccgggcgcttacctgtggctgctggggtcggccgcccgggaccaggctgggagccccgagaaacgcttcgttaagggactcaggcagtacgggaagaacttcttcagaattagaaaggagctgcttcccaataaggaaacaggggagctgatcaccttctattactattggaagaagacccccgaagcagccagctcccgagcccatcgtaggcaccgcaggcaggccgtgttcaggaggattaagactcgcaccgcgtccacacccgtcaacacaccctccagacccccgtccagtgaattcttggacctaagttcagccagtgaagatgacttcgacagtgaggacagtgagcaggagtgaaggggtacgcctgccgccactgcttcaccaccacctccaaagattggcaccacggaggccgggagaacatcctgctttgcaccgactgtcgcatccacttcaagaaatacggtgagctcccgcccattgagaagcccgtggacccgccaccgtttatgttcaaacccgtcaaggaagaggatgatgggctcagtgggaagcatagcatgaggacacggcggagtcggggctcgatgtcgacactacgcagtggtggaagaagcagccagccagccctggatggtcgcacctcacccatcaatgaagacatccgctccagcggccggaactcccccagcgctgccagtacctccagcaatgacagtaaagcagagacagtgaagaagtcggccaagaaggtgaaggaggaagcttcttcccttcttaagagtaacaaacgccagcgggagaaggtggcctctgatacggaggaggctgacaggaccagctccaagaagacaaaaacgcaggagatcagcaggcccaactcgccatctgaaggtgagggagagagttcagacagtcgcagcgtcaacgatgagggtagcagtgaccccaaagacatcgaccaggacaatcgcagcacgtccccgagcatccccagcccccaggacaatgagagtgactcggactcgtcagcccagcagcagatgctgcaggcccagcccccagccttgcaggctcccactggggtcaccccagctccctcctcagctcctccagggacccctcagctgcccacgccagggcccacgccctctgccactgcagttcccccacagggctcccccacggcctcccaggcccctaaccagccacaggctcccacagcgcctgttccccacacccacatccaacaggcaccggccttgcacccccagcggccgccctcaccgcatcccccgccgcatccctcgccacatcccccactgcagcctctgactgggtcggcgggccagccttctgcaccctctcatgcccagcccccactgcacggtcagggcccacccggccctcacagcctgcaggctgggcccctgctgcagcacccaggccccccacagccctttggcctccctccccaggcctcccaaggccaggcccctctggggacctccccagcagcagcgtaccctcacacctccctgcagctgccagcctctcagtcagcgctgcagtcccaacagcctccacgggagcagcccctgccaccagcgcccttggccatgccccacatcaagcccccgcctaccactcccatcccccagctgccggcgccacaggcccacaagcaccctccccacctctcggggccctcacccttctccatgaatgccaacctgcctccccctccagccctgaagcccctgagctccctgtccacacatcaccccccgtcggctcaccccccacccctgcaactcatgcctcagagccagccattgccctcctcgcccgcccagccccccgggctgacccagagccagaacctgcccccgccccctgcctcccacccccctacaggcctccaccaggtggccccccaacccccgtttgctcagcacccctttgtccctggaggccctcctcccatcacccctccgacctgcccctccacctctaccccaccggcgggacctggcacctcggcccagccaccctgctctggtgcggcggcttcaggaggcagcatagcgggggggtcgtcctgcccactccccaccgtccagatcaaggaggaggctctggacgacgctgaggagcctgagagcccccctcccccaccaaggagcccgtccccggagcccactgtggtggacacccccagtcacgccagccagtcagctaggttctacaaacacctggaccggggctacaactcgtgtgcccggacagacctgtacttcatgcctctggccgggtccaagctggccaagaagagggaggaggccattgagaaggccaagcgcgaggctgagcagaaagcccgagaggagcgagagcgggagaaggagaaggagaaggagcgggagcgggagcgagagcgggagcgcgaggcagagcgggcggctaaggcgtccagctcagcgcatgaaggtcgcctcagtgacccacagctcagtggtcctggccacatgcggccatccttcgagccaccaccaaccaccattgctgctgtgcccccctacatcgggcccgacacacctgcccttcggactctgagcgagtacgcccggccccacgtcatgtcgcccaccaaccgcaaccaccccttctacatgccccttaaccccacggaccccctgctggcctaccacatgcctggcctctacaacgtcgaccccaccatccgcgagcgggagctccgggagcgggagatccgagagcgggagatccgagagcgggagctgcgggagaggatgaagccgggcttcgaggtgaagcccccagagctggaccccctgcacccagccgccaaccccatggagcactttgcccggcacagcgccctcaccatccccccgaccgccgggccccacccttttgcttctttccacccgggcctgaaccccttggagagggagagactggccctggcgggcccccagctgcggcccgagatgagctaccctgacagactggcagccgagcgtatccacgcagagcgcatggcatcgctgaccagcgatcccctggcccgactgcagatgttcaacgtgactccgcaccatcaccagcactctcacattcactcccacctccacctccaccagcaggaccccctccaccaaggttcagcaggccccgttcacccgctggtcgaccccctgactgccggtccccacctggctcgcttcccctacccgcctggcactctccccaaccctctgcttggacagcccccacacgagcacgagatgcttcgccacccagttttcggcaccccctacccccgtgacctgcctggggccatcccaccccccatgtcagcagcccaccagctgcaggccatgcatgcccagtcggccgagctgcagagactggccatggagcagcagtggctgcatggacacccccacatgcatggtggccacctaccaagtcaggaagattattacagtcgactgaagaaagaaggtgacaagcagttataagttatttatttgttaacgctggctgtggaaaccccagttcttggggggagaaacaggactttttacataaaataggagctgcaaaagcaaaaagaatatcttctaaagattctttatatatttaaaaacccacaactaaaaatgtatccacatagtagtgttcgtttgtcgagaggatttcctgagactggtttggatctccctgcatgacagtcccccagaaacttagtgagtcctggactggactgaacatccagaaagcttccctgcaatcttggggtttggctttagttttcttttccttgatttctcagtaggtgctagaatccagttcacacccttcactgtgcgtgcagacacactgacacactccgccacgagtgctccagagcccacgaggcttgcagatcgggggcataggaatttggaatccaagagctataatttttaaaaaaaaaaaaatcttttattttaatacattgtaggaaatcttcataattggagaaagttctgcagcatggctttttacgtctgtaaataaataattttagaacagcctttttttcttccataaactactattgtgatctattttttccagccatgtcactaattgtgaattcctaccaactattgacagaatacagagttgattttttaataaaaagttatatataattatccctttaattaaagggagcaaaggggcgttccacatggacagaggcttggaccgaggcctggtcacagcagcgagcatccagggtttgcagggacgatgttacagactctgttttctgcctggcgtttcacttgtgtctgctcctagcctgtgctctgccagcagcacagacatctgctccatcagacctcttccattttgcacagggagtgcaggaggtgaatgttcactttctgttctccagtgtcactgttctgtttccacgggatggaaagcgcatgggcctgtgtccattgtagatttccttctagat

SEQ ID NO: 72 - DNA, 2403 bp, Homo sapiens
agccgctctgcgccccgcgccctgcttgcccccattatccagccttgccccggcgccctgacctgacgccctggcctgacgccctgcttcgtcgcctcctttctctcccaggtgctggaccagggactgagcgtcccccggagagggtccggtgtgaccccgacaagaagcagaaatggggaagaaactggatctttccaagctcactgatgaagaggcccagcatgtcttggaagttgttcaacgagattttgacctccgaaggaaagaagaggaacggctagaggcgttgaagggcaagattaagaaggaaagctccaagagggagctgctttccgacactgcccatctgaacgagacccactgcgcccgctgcctgcagccctaccagctgcttgtgaatagcaaaaggcagtgcctggaatgtggcctcttcacctgcaaaagctgtggccgcgtccacccggaggagcagggctggatctgtgacccctgccatctggccagagtcgtgaagatcggctcactggagtggtactatgagcatgtgaaagcccgcttcaagaggttcggaagtgccaaggtcatccggtccctccacgggcggctgcagggtggagctgggcctgaactgatatctgaagagagaagtggagacagcgaccagacagatgaggatggagaacctggctcagaggcccaggcccaggcccagccctttggcagcaaaaaaaagcgcctcctctccgtccacgacttcgacttcgagggagactcagatgactccactcagcctcaaggtcactccctgcacctgtcctcagtccctgaggccagggacagcccacagtccctcacagatgagtcctgctcagagaaggcagcccctcacaaggctgagggcctggaggaggctgatactggggcctctgggtgccactcccatccggaagagcagccgaccagcatctcaccttccagacacggcgccctggctgagctctgcccgcctggaggctcccacaggatggccctggggactgctgctgcactcgggtcgaatgtcatcaggaatgagcagctgcccctgcagtacttggccgatgtggacacctctgatgaggaaagcatccgggctcacgtgatggcctcccaccattccaagcggagaggccgggcgtcttctgagagtcagatctttgagctgaataagcatatttcagctgtggaatgcctgctgacctacctggagaacacagttgtgcctcccttggccaagggtctaggtgctggagtgcgcacggaggccgatgtagaggaggaggccctgaggaggaagctggaggagctgaccagcaacgtcagtgaccaggagacctcgtccgaggaggaggaagccaaggacgaaaaggcagagcccaacagggacaaatcagttgggcctctcccccaggcggacccggaggtgggcacggctgcccatcaaaccaacagacaggaaaaaagcccccaggaccctggggaccccgtccagtacaacaggaccacagatgaggagctgtcagagctggaggacagagtggcagtgacggcctcagaagtccagcaggcagagagcgaggtttcagacattgaatccaggattgcagccctgagggccgcagggctcacggtgaagccctcgggaaagccccggaggaagtcaaacctcccgatatttctccctcgagtggctgggaaacttggcaagagaccagaggacccaaatgcagacccttcaagtgaggccaaggcaatggctgtgccctatcttctgagaagaaagttcagtaattccctgaaaagtcaaggtaaagatgatgattcttttgatcggaaatcagtgtaccgaggctcgctgacacagagaaaccccaacgcgaggaaaggaatggccagccacaccttcgcgaaacctgtggtggcccaccagtcctaacgggacaggacagagagacagagcagccctgcactgttttccctccaccacagccatcctgtccctcattggctctgtgctttccactatacacagtcaccgtcccaatgagaaacaagaaggagcaccctccacatggactcccacctgcaagtggacagcgacattcagtcctgcactgctcacctgggtttactgatgactcctggctgccccaccatcctctctgatctgtgagaaacagctaagctgctgtgacttccctttaggacaatgttgtgtaaatctttgaaggacacaccgaagacctttatactgtgatcttttacccctttcactcttggctttcttatgttgctttcatgaatggaatggaaaaaagatgactcagttaaggcaccaaaaaaaaaaaaaaaaaaaaaaaa

SEQ ID NO: 73 - DNA, 5171 bp, Homo sapiens
  modified_base (1099): n = a, c, g or t/u
ggcacgagcgcgggcggaggcggcccggcgggccctgggagagctgggacgggcggcggccgggtggcctcggccacccgctaattgcatcttttcccggcgtctcgtctgcagagggagcactatgtctgcggaagtccccgaggcagcctccgcggaggagcagaaggaaatggaagataaagtgactagtccagagaaagcagaagaagcaaaattaaaagcaagatatcctcatctgggacaaaagcctggaggttcagatttcttaaggaaacggttgcagaaagggcaaaaatattttgattctggggattacaacatggctaaagcaaaaatgaagaacaagcaacttcctactgcagctccggataagacggaggtcactggtgaccacattcccactccgcaagaccttcctcaacggaagccgtcccttgttgctagcaagctggctggctgattaagaagctgaactgcatgaatctgctaaatctcattatttctccttaatatgttacttatctactttttatttcctttcattcactagtcatttgagactgacagctttgcaggtagcagtagtgtgtgctgctattgtggaatatacgtgtgtagagtttttgattagtttaacagtgcactggtgaagaggacatgttagagcaacataagtaaactacttgaaaatagttgtatatattacctaacttctagtgtagtactggttctaacaagtaacaagcaagttttaaaattttaatgttttggctttcattacttcatcttaattatagctttgtatgttactcttatttaatataatctctattgtattgatttcttctgtatttaccttttggattttgtaaaacagaagtttaagaccacaagttagaagaaaggtcacatatttcaaacacaactagatggggctctgaaagatttgtatctctgtgcttgaacttgaatggccttaaacctgtttcagctttaacagtagaattttacttgggcaatatttgcccattctggtgtaacttatgtgactctagtgcttaacagctgccgttgaagctaatattcagttctgtanagttagaataccttttgttgttgaagatgtgaatgaagtatgccatgtgcattaactgtttgaattcacttttgtgccatttttgtaaatacagtagttttgcacaacctctcacaaatgtctgtattaatttcacatacttaaaaagtagataatgtgccaaccagaagcacaagagttcctacacaaaactctgtaaatcattatagcttttgtataataagagtagtttacaatctcgggcttatagaataccaaactgaaatcttagttcaatctgccatagacttaagcttttcatttgttactaatatccatgacattcagtggccttgtgcaaatacgatatgttgcttaggcatatcttttgtcctatgcagaacctttcattttgatttttatgaaagttgcaattcatgtaatttatataaactttttaaatgtagaaactttttacttccacactcagttttggagaccctagaataaaaggcttcaatactctgcattccatgccctctgccacctgcttttttttcccctttgttctttgactcaaatggtattgagctgtttgttgtatatggaagcataggtgtctatatccttactcttttatataacacaataatggcgttttccttctaatttctcagttgttaacttctttctcttttttttttaggatagggccttgctctgtcacctgagctctagtgcagtagtgcaatcacagctcactgcaaccttactcctaggctcaagttaactattcttgatcctttattattactaatattctacaattgtttaaataaaaggaactttataatgaaacggttcggaatactggctcaagaacctatgtcaagatgagctgaattttggtaaattattttaggaattatgacaagctaattgaattaggcttgtgacaattagagtaatttacatgacaggtaaaactcctattaaaaatgtttagatgtttgcttctgtagatgtcactttagtaaaataccaatttagttttacttgtggcttatctagttagaacttagcagactttactgggacaagtttactgctcttgtaggagctcctctcacaagtagttgtaatgctgtagcatgatactcaggatcagtagcttgagatgttactatttttctcttcatctttgacttgcagagagcctcccgtttttggatccaggcatcttttctgaatcctggttccatcagtatacctgctctcctatgaccccaaatcatagtcaatggtgcctcaaacatagcaccttaagttaaaggctgcctagtgctctgaggaaagcttgctgattatcttcctgatctactcaccccaaaaggcagaaaagcaacacagtcactgctgtggtcatttgtaatgtaaagatcagttatatatatatatttgtaatgagagcaagtatatactcattatagaatcaatttaagaagtttaaaataacccagagtagaatttctatatctagtcttggtttttttcatgaatatttgcaagtaattaccattaaattcacacatgaaagattaatctgaaagatcagagaccatgttattcctgaccacgatagaactgctcctgtggtttgggacaagtaataaaacaactgcttgagttttgtttgtaaaatacataattaatatttgacctacctcaaaatgtattgaggatctgtgaaatgctaagtgcccaaaataaaatattgctgattgtctttttattaaaagtaaatttcctcattaagccaacctgccttctgtaagtcacagtgcttaaatctcaggatttttcattaggagagacctgtcgttaaggatttgtaggtataattgcttagcctccattattggtgcttgggatagagaggttttagatttttgttttttttttgttctgcctcaaagctcagtttattgaagacatttgtaagctattggatcatcacttgaatcaagattttgactagtgagcttaattgtccatttcttacaatttcaaagttacagtctcagaaatggttaattttaataactgtcctatcataaattaatgttggaataaattgaagttgttgataaatacttcatgaaaactaaagtctgaaataaattacttgttttatgtccaatagctactacatttgatagaacagttttgaggaacatttcattcttgaacgcagcatctgacatggttctcagcaagttggaatagtaaggattattggcttgtttcgatgagtggaagcggcatgtttgtagcatacaagttattcaataatcttgtgctgatgacctaaaaatatgtcttaactattcatcaaggaaagcctggtgaagcctttacttgttactacttcaacagttggaattagttgtctttttacttgatgaaacaaaactatacctctgaatatttatggatactttttactaaatcaggcttgtgttcttaatccaaattagtaaagttttatggaagctgaaatgtaatacagtagtctccccttatctgtaagagatacattccaagacccctagtggatgcctgaaacctcagatagtactgaaccctttatcaactatgttttttcagtctgacaaccaaggcggctactaagtgactaaggggcaggtagtatacagtgtggataagcaggacaaaggggtgattcacatcccaggcaggacagagcaggagatcatgagatttcatcactcaggatggcttgtgatttattttattttattcttttttttttttgagatggagtctcactcttgcccaggctggagtgcagtggtgcgatcttggctcactgcaacctctgcctcctgggttcaagcagttctcctgcctcagcctcccaagtagctgggattacaggcgtccgccaccatgcccagccaatttttgtacttttagtagagatggggtttcaccatgttggccaggctggtcttgaactcctgacctcaggtgatccactcgcctcggcctcccaaagtgctgggattataggcatgcgccaccatgcccggccggcttatgatttaaaacatgaattgtttatttctggaattttccacataatatttttggaccaaggttgcctcaggtaacaaactacagaaagtgaaattgcagataaaggggattactgctcctctgctctaaaattggtgtttgggtgatcagaagcaggtagccaatgggaagagcacttctgagtgataactaaagcagtttggtggccttttcacattctccaatgttcaaacatattttccactttccattttctctttcacctcattttgcctctctatcccccatccctgcttatttcttaagcccattgatggcactcattaaattgtatttagggctaatgagtcattgttccttaatatcgttttcaatatgccacaatttaggacacatttaaaattttttaaaacaatatcctaatcaatattgactaatttgagccacattcccaactctaactcagcacacactgccagtcttccccaatatctgtctcctctcaattccccaccacaccttataaaattgtaatcaaagatatctcactctgtcattgttaatctaagaataaaaacactgactttaatacggttttactaagtttcaaccttctaattaggtaggcctctaggtattctgcagatcactgctggtcttgatagccattaatatatgtttgtattatgttatttttcaactaaatcgcagttggaaaaaaaacatatttaatattatgcccttggatctgttactgcatcactagcacttgtgatgcaatagaacacttcgcctgtactgaaagggccaagagtaaatgccttgttttgtttttttgttttgttttgttttgctttttgttaaaacatgtctatagagttggcagttaatgctgaatttgtcaaataccccttccaaaattatacttgtatttaaaaaataaatggatctacctaaaaaaaaaaaaaaaaaa

SEQ ID NO: 74 - DNA, 6147 bp, Homo sapiens
atgctgcgagtgattgtggaatctgccagcaatatccctaaaacgaaatttggcaagccggatcctattgtttctgtcatttttaaggatgagaaaaagaaaacaaagaaagttgataatgaattgaaycctgtctggaatgagattttggagtttgacttgaggggtataccactggacttttcatcttcccttgggattattgtgaaagattttgagacaattggacaaaataaattaattggcacggcgactgtagccctgaaggacctgactggtgaccagagcagatccctgccgtacaagctgatctccctgctaaatgaaaaagggcaagatactggggccaccattgacttggtgatcggctatgatccgccttctgctccacatccaaatgacctgagcgggcccagcgtgccaggcatgggaggagatggggaagaagatgaaggtgatgaagacaggttggacaatgcagtcaggggccctgggcccaaggggccagttgggacggtgtcggaagctcagcttgctcggaggctcaccaaagtaaagaacagccggcggatgctgtcaaataagccacaggacttccagatccgcgtccgagtgattgagggccgacagttaagtggtaacaacataaggcctgtggtcaaagttcacgtctgtggccagacacaccgaacaagaatcaagagaggaaacaaccctttttttgatgagttgtttttctacaatgtcaacacgaccccttctgaattgatggatgagatcatcagcatccgggtttataattctcactctctgcgggcagattgtctgatgggggaatttaagattgatgttggatttgtttatgatgaacctggccatgctgtcatgagaaagtggcttcttctcaatgacccggaagataccagttcaggttctaaaggttatatgaaagtcagcatgtttgtcctgggaaccggagatgagcctcctcctgagagacgagatcgtgataatgacagtgatgatgtggagagtaatttgttactccctgctggcattgccctccggtgggtgaccttcttgctgaaaatctaccgagctgaggacatcccccagatggatgatgccttctcacagacagtaaaggaaatatttggaggcaatgcagataagaaaaatctcgtggatccttttgtagaagtttcctttgctggaaaaaaggtttgtacaaacataattgagaaaaatgcaaacccagagtggaatcaggtcgtcaatcttcagatcaagtttccttcagtgtgtgaaaaaataaaactaacaatatatgactgggaccgtcttactaaaaatgatgtagttggaacaacatatctacacctctctaaaattgctgcctctggtggggaagtggaagtaaacacaggagaaacagaggtaggctttgttccaacgtttggaccttgttacctgaatctttatggaagccccagagagtacacgggattcccagacccctatgatgagctgaatactggaaagggggaaggagttgcctacagaggcaggatcttggttgaattagccacttttcttgagaagacaccaccagataaaaagcttgagcccatttcaaatgatgacctgctggttgttgagaaataccagcgaaggcggaagtacagcctgtctgccgtgtttcattcagccaccatgttgcaagatgttggtgaggccattcagtttgaagtcagcattgggaactatggcaacaagtttgacaccacctgtaagcctttggcatcaacaactcagtacagccgtgctgtatttgatggcaactactattattacttgccttgggcccacaccaagccagttgttaccctgacttcatactgggaggatattagtcatcgcctggatgcggtgaacgctctcctagctatggcagaacggctgcaaacaaatatagaagctctaaaatcagggatacaaggtaaaattcctgcaaaccagctggctgaattgtggctgaagctgatagatgaagttatagaagacacgagatacacgttgcctctcacagaaggaaaagccaacgtcacagttctcgatactcagatccgaaagctgcggtccaggtctctctcccaaatacatgaggcggctgtgaggatgaggtcggaagccacagatgtgaagtccacactggcagaaattgaggactggcttgataaattaatgcagctgactgaagagccacagaacagcatgcctgacatcatcatctggatgatccggggagagaagagactggcctatgcacgaattcccgcacatcaggtcttgtactccaccagtggtgagaatgcatctggaaaatactgtgggaaaacccaaaccatctttctgaagtatccacaggagaaaaacaacgggccaaaggtgcctgtggagttgcgagtgaacatctggctaggcttaagtgctgtggagaagaagtttaacagcttcgcagaaggaactttcaccgtctttgctgaaatgtatgaaaatcaagctctcatgtttggaaaatggggtacttctggattagtaggacgtcataagttttctgatgtcacaggaaaaataaaactcaagagggaattttttctgcctccaaaaggctgggaatgggaaggagagtggatagttgatcctgaaagaagcttgctgactgaggcagatgcaggtcacacggagttcactgatgaagtctatcagaacgagagccgctaccccgggggcgactggaagccggccgaggacacctacacggatgcgaacggcgataaagcagcatcacccagcgagttgacttgtcctccaggttgggaatgggaagatgatgcatggtcttatgacataaatcgagcggtggatgagaaaggctgggaatatggaatcaccattcctcctgatcataagcccaaatcctgggttgcagcagagaaaatgtaccacactcatagacggcgaaggctggtccgaaaacgcaagaaagatttaacacagactgcttcaagcaccgcaagggccatggaggaattgcaagaccaagagggctgggaatatgcttctctaattggctggaaatttcactggaaacaacgtagttcagataccttccgccgcagacgctggaggagaaaaatggctccttcagaaacacatggtgcagctgccatctttaaacttgaaggtgcccttggggcagacactaccgaagatggggatgagaagagcctggagaaacagaagcacagtgccaccactgtgttcggagcaaacacccccattgtttcctgcaattttgacagagtctacatctaccatctgcgctgctatgtctatcaagccagaaacctcttggctttagataaggatagcttttcagatccatatgctcatatctgtttcctccatcggagcaaaaccactgagatcatccattcaaccctgaatcccacgtgggaccaaacaattatattcgatgaagttgaaatctatggggaaccccaaacagttctacagaatccacccaaagttatcatggaactttttgacaatgaccaagtgggcaaagatgaatttttaggacgaagcattttctctcctgtggtgaaactgaactcagaaatggacatcacacccaaacttctctggcacccagtaatgaatggagacaaagcctgcggggatgttcttgtaactgcagagctgattctgaggggcaaggatggctccaaccttcccattcttccccctcaaagggcgccaaatctatacatggtcccccaggggatcaggcctgtggtccagctcactgccattgagattctagcttggggcttaagaaatatgaaaaacttccagatggcttctatcacatcccccagtcttgttgtggagtgtggaggagaaagggtggaatcggtggtgatcaaaaaccttaagaagacacccaactttccaagttctgttctcttcatgaaagtgttcttgcccaaggaggaattgtacatgcccccactggtgatcaaggtcatcgaccacaggcagtttgggcggaagcctgtcgtmggccagtgcaccatcgagcgcctggatcgctttcgctgtgacccttatgcagggaaagaggacatcgtcccacagctcaaagcctcccttctgtctgccccaccatgccgggacatcgttatcgaaatggaagacaccaaaccattactggcttctaagctgacagaaaaggaggaagaaatcgtggactggtggagtaaattttatgcttcctcaggggaacacgaaaaatgcggacagtatattcagaaaggctattccaagctcaagatatataattgtgaactagaaaatgtagcagaatttgagggcctgacagacttctcagatacgttcaagttgtaccgaggcaagtcggatgaaaatgaagatccttctgtggttggagagtttaagggctcctttcggatctaccctctgccggatgaccccagcgtgccagcccctcccagacagtttcggggattacctgacagcgtcccacaggaatgcacggttaggatttacattgttcgaggcttagagctccagccccaggacaacaatggcctgtgtgacccttacataaaaataacactgggcaaaaaagtcattgaagaccgagatcactacattcccaacactctcaacccagtctttggcaggatgtacgaactgagctgctacttacctcaagaaaaagacctgaaaatttctgtctatgattatgacacctttacccgggatgaaaaagtaggagaaacaattattgatctggaaaaccgattcctttcccgctttgggtcccactgcggcataccagaggagtactgtgtttctggagtcaatacctggcgagatcaactgagaccaacacagctgcttcaaaatgtcgccagattcaaaggcttcccacaacccatcctttccgaagatgggagtagaatcagatatggaggacgagactacagcttggatgaatttgaagccaacaaaatcctgcaccagcacctcggggcccctgaagagcggcttgctcttcacatcctcaggactcaggggctggtccctgagcacgtggaaacaaggactttgcacagcaccttccagcccaacatttcccagggaaaacttcagatgtgggtggatgttttccccaagagtttggggccaccaggccctcctttcaacatcacaccccggaaagccaagaaatactacctgcgtgtgatcatctggaacaccaaggacgttatcttggacgagaaaagcatcacaggagaggaaatgagtgacatctacgtcaaaggctggattcctggcaatgaagaaaacaaacagaaaacagatgtccattacagatctttggatggtgaagggaattttaactggcgatttgttttcccgtttgactaccttccagccgaacaactctgtatcgttgcgaaaaaagagcatttctggagtattgaccaaacggaatttcgaatcccacccaggctgatcattcagatatgggacaatgacaagttttctctggatgactacttgggtttcctagaacttgacttgcgtcacacgatcattcctgcaaaatcaccagagaaatgcagattggacatgattccggacctcaaagccatgaacccccttaaagccaagacagcctccctctttgagcagaagtccatgaaaggatggtggccatgctacgcagagaaagatggcgcccgcgtaatggctgggaaagtggagatgacattggaaatcctcaacgagaaggaggccgacgagaggccagccgggaaggggcgggacgaacccaacatgaaccccaagctggacttaccaaatcgaccagaaacctccttcctctggttcaccaacccatgcaagaccatgaagttcatcgtgtggcgccgctttaagtgggtcatcatcggcttgctgttcctgcttatcctgctgctcttcgtggccgtgctcctctactctttgccgaactatttgtcaatgaagattgtaaagccaaatgtgtaa

SEQ ID NO: 75 - DNA, 2693 bp, Homo sapiens
ggaagctggagccacctgcggctctgagagggacagacggtgctcagcctgtgtcctggggcaaagctggattcattttcctccctggcgatcttctggggcccacagctggtgatatggaggcactgacaccctggtctcggcgcttgttttagaagaggcagaacagtgataaagacaaggatctaaatgggcaaggacgccctgccctcactgggctcactggcagccctgaccctctattctgcaccctgtgagccaccgagactgaaccaaacccaggaagcggcgccaccaaccagcctcgcagaggcagaggccctggagcagtgacagcacaggagatctgctggctcgggggaaggggaggaaagaggaaaacaaagggagtgatcgagtgagcctcgccccgccctccctgcgccggcccatgatgtgtcagtcagaggcgcggcaaggaccagagctccgcgcggcgaaatggttgcacttcccccagctggccctgaggcggaggctggggcagctgagctgcatgtccagacccgctctgaaactgcgctcctggcccttgaccgtcctctactacctcctgcccttcggcgccctcagaccgctcagccgggtgggatggaggcccgtaagcagggtggctttgtacaagtcagtgccaacgcgcttgctgtcacgggcctggggtcgcctcaatcaggtggagctgccacactggctgcgcaggcccgtctacagcctgtacatctggacgtttggggtgaacatgaaagaggccgctgtggaggacctgcatcactaccgcaacctcagcgagttcttccggcgcaagctgaagccgcaggcccggcctgtctgtggcctgcacagcgtgattagcccatcggatggaaggatcctcaactttgggcaggtgaagaactgtgaggtggagcaggtaaagggggtcacctactccctggagtcgttcctgggcccgcgtatgtgcacagaggacctgcccttcccaccagccgcgtcgtgtgactccttcaagaaccagctggtcacccgggaagggaatgagctctatcactgtgtcatctacctggcccctggggactaccactgcttccactcccccaccgactggactgtgtcccaccggcgccacttcccaggctccctgatgtcagtgaaccctggcatggctcgctggatcaaagagctcttctgccataacgagcgggtggtcctgacgggggactggaaacatggcttcttctcactgacagctgtgggggccaccaacgtgggctccattcgcatctactttgaccgggacctgcacacaaacagcccaaggcacagcaagggctcctacaatgacttcagcttcgtgacgcacaccaatagagagggcgtccccatgcgtaagggcgagcacctgggcgagttcaacctgggctccaccatcgtgctcatcttcgaggcccccaaggacttcaatttccagctgaaaacaggacagaaaatccgctttggggaagccctgggctcgctctagagtctctttcctgattatggctgctaagggatcttttccaaacagagtgagggtcttttcaagagggaggcccatgaggccatccaggtaagggcctgcctcagcgtggttgggagtctgaccaggtaggacttgaatgattcggctaccacctgttccagaggtgcagacaagaggtggcgagagcccccatcatgcccctcaacctatcccgttccttctgcctacaaataaaaagtgcaggctggaatgatctcagtcacatttggatctttttaaacactgtatagacggaagagcctgcattcctgaccgaaccttcagttggtctcggttgtcgttttttcttgctgctcctccccccatcacctgagctgttttctgttggccccttttgttttttggccttaacgctcctgctgcacagggtgaggtgcctccttggcacagactgtggatgcctctcccccagcagagccacacagccttcgtgacaactgctttccgttcccacattcacctcatcctgctctttagaaaaagcagtctttgtgcttgtggctgaacgcatcaccctggactctgctagtgtcttctgaggacactgatgacactgattaatgatacagacctttgcaggacctgatgagtgacccttctggagctggccaggtcctctgcagcaggcaagaccaatcaatcactgaacctgcctcatggcaccagagtgaacagggcaggcaggtagtaggcccagctggggaaatgggagagttcctgtccccctccacatatccctacatgaaatatgggaaagttgctgctattgattcagggtctgtcttggaggcagaggacccttggtggatagttggtcagtgcctggaaaacctgtcccagtttatcaggaacgcaggcctggggagcccccagtggcggggacagggccagatttcatgttgaccctggggatgctgtgaatttctcctgcaggagagacatcattgaattttttcaactgtatcagtagcacagtatttttgtatgaaaagtgggagacttctgaacagtaattcatttaattgcaaagcattttgaaataaaaaaaatcaaacttaaaaaaaaaaaaaaaaaa

SEQ ID NO: 76 - DNA, 482 bp, Homo sapiens
gtcctataggcgctaggtggaaatagcaaaaacaaggcccaggctgggcaggccagaggggaaggccctggattctcactcatgtgagatcttgaatctctttctttgttctgtttgtttagttagtatcatctggtaaaatagttaaaaaacaacaaaaaactctgtatctgtttctagcatgtgctgcattgactctattaatcacatttcaaattcaccctacattcctctcctcttcactagcctctctgaaggtgtcctggccagccctggagaagcactggtgtctgcagcacccctcagttcctgtgcctcagcccacaggccactgtgataatggtctgtttagcacttctgtatttattgtaagaatgcttatcatgaagatacacactgtaactacaagaaattataaatgtttttcacatcaaaaaaaaaaaaaaaaaaacaaacaaaacaacacacaaaaccaaaaaaaa

SEQ ID NO: 77 - DNA, 1038 bp, Homo sapiens
aggagacttggcctccgcagctgccctccggccccccacggctgccgggttccggggtgcaagtgaagcagcctccccgcggaggccgcagcgccccgaccaggcctctttaagcgcaggccccgccccgggcgccaccgccccgccccgcggatcccgctcccgcaccgccatcatgatctgcctggtgctgaccatcttcgctaacctcttccccgcggcctgcaccggcgcacacgaacgcaccttcctggccgtgaagccggacggcgtgcagcggcggctggtgggcgagattgtgcggcgcttcgagaggaagggcttcaagttggtggcgctgaagctggtgcaggcctccgaggagctgctgcgtgagcactacgccgagctgcgtgaacgcccgttctacggccgccttgtcaagtatatggcctccgggccggtggtggccatggtatggcaggggctggacgtggtgcgcacctcgcgggcgctcatcggagccacgaacccggccgacgccccgcccggcaccatccgcggggatttctgcatcgaggttggcaagaacctgattcacggcagcgactcggtggagagtgcccgccgcgagatcgctctctggttccgcgcagacgagctcctctgctgggaggacagcgctgggcactggctgtatgagtagcccggcagatgcgcgtcacagaggctctcacactccagcctcctccagggcccaggtgggcgggcttctggccccaccccacagcgcttggagcatccctttggacgggctgctgaacatccacctgtctggacgttgcatggagggtggcgcaggcctctccaatccctggcgtacagggtttcctgcccgaggagctgctccaggagcctgcgcggctcgcctggaaacgtgccaggacactgtcctggtgcccagcccaacgtggtccaacgtttttttataataaagtcctcgttttcgtttcggtttgggcccaggaacaggcaaaaaaaaaaaaaaaaaaaaaaaaa

SEQ ID NO: 78 - DNA, 653 bp, Homo sapiens
tttttttttttttaacagcaaaaattccctttactgaatatttttaaaagtagacaattatcttgtggagaatagtcttgagaatctttcaagatggaccaggctgttcttgcctgtgagttgtctgtctgtgcgcctcatcttcagggagagttggtggaaacaaagcaacaggcaaaatccatagtcaactggatagaaatagctcaaaaaagtcctattcacaaggtaaccttgaaggtgacaagctggaaatctaagcttcaggaagccacagcatttggcacacccaggatcacacatatatccatcctttctggcaccctcttcgcccagttgatcatgtgaaccagctccctgtctgccaggttggtcagtaagcccatcatcgaagcttcactgaagggtctggtaggatcatactcggaatagagtatcgggggctcagcatccaacaaggcactgaccatctggtcggccgtcagggacaaggccaggctgttcttcttagagcgtttgatcatgagcgggcttggccaaaggttggcagctctcatgtctccagcagaccccacttcacccctgccctccccatcatctctctggcgcttgtgtttcaacattctccctcctcttcggtcttttcgtatccc

SEQ ID NO: 79 - DNA, 1249 bp, Homo sapiens
aggagctggcggagggcgttcgtcctgggagctgcacttgctccgtcgggtcgccggcttcaccggaccgcaggctcccggggcagggccggggccagagctcgcgtgtcggcgggacatgcgctgcgtcgcctctaacctcgggctgtgctctttttccaggtggcccgccggtttctgagccttctgccctgcggggacacggtctgcaccctgcccgcggccacggaccatgaccatgaccctccacaccaaagcatctgggatggccctactgcatcagatccaagggaacgagctggagcccctgaaccgtccgcagctcaagatccccctggagcggcccctgggcgaggtgtacctggacagcagcaagcccgccgtgtacaactaccccgagggcgccgcctacgagttcaacgccgcggccgccgccaacgcgcaggtctacggtcagaccggcctcccctacggccccgggtctgaggctgcggcgttcggctccaacggcctggggggtttccccccactcaacagcgtgtctccgagcccgctgatgctactgcacccgccgccgcagctgtcgcctttcctgcagccccacggccagcaggtgccctactacctggagaacgagcccagcggctacacggtgcgcgaggccggcccgccggcattctacaggaaccagggaaaatgtgtagagggcatggtggagatcttcgacatgctgctggctacatcatctcggttccgcatgatgaatctgcagggagaggagtttgtgtgcctcaaatctattattttgcttaattctggagtgtacacatttctgtccagcaccctgaagtctctggaagagaaggaccatatccaccgagtcctggacaagatcacagacactttgatccacctgatggccaaggcaggcctgaccctgcagcagcagcaccagcggctggcccagctcctcctcatcctctcccacatcaggcacatgagtaacaaaggcatggagcatctgtacagcatgaagtgcaagaacgtggtgcccctctatgacctgctgctggagatgctggacgcccaccgcctacatgcgcccactagccgtggaggggcatccgtggaggagacggaccaaagccacttggccactgcgggctctacttcatcgcattccttgcaaaagtattacatcacgggggaggcagagggtttccctgccacagtctgagagctccctggc

SEQ ID NO: 80 - DNA, 2248 bp, Homo sapiens
aagcgcgaccgacgcggggccggggcgcggggcggagagacgcggccgcctcggcctcgacgccagcccaggcgccgacctccgattctcctgtcgccgaggacgcctcccggaggcggcgtgccgggcctgcgtcgacttcaagacgtggatgcggacgcagcagaagcgggacaccaagtttagggaggactgcccgccggatcgcgaggaactgggccgccacagctgggctgtcctccacaccctggccgcctactaccccgacctgcccaccccagaacagcagcaagacatggcccagttcatacatttattttctaagttttacccctgtgaggagtgtgctgaagacctaagaaaaaggctgtgcaggaaccacccagacacccgcacccgggcatgcttcacacagtggctgtgccacctgcacaatgaagtgaaccgcaagctgggcaagcctgacttcgactgctcaaaagtggatgagcgctggcgcgacggctggaaggatggctcctgtgactagagggtggtcagccagagctcatgggacagctagccaggcatggttggataggggcagggcactcattaaagtgcatcacagccagagcctgttgtgtctcagttgggtggtccccaggacactgcctgtggggacctgccctgcccctcttaggtttggagcagaagtggaggtgcccacagcaggtacccactggccccctcctcagtggagaccccaaggagctgcagctgaactgcaggggagggaaggaggagcagcctgggctgccccttgacattcaggatgtagcttcctgcccaccgcataccctggcgcctcactcctcacacgggaagacagcgggcctggctgggcatccctgtgcctgtccctggcggccaggccattgccttcccactatgcagccagggatgcccctgccccccatggctctgtgctgctcactttagggggctcaattctccactctgctcagtcctacagggaaagctcaggtcgggtctttctgagggtccaccagccatcctaccctctccctgcctggcacatgcctgccagcgttgtgtcatgcctgtccacaggggattcgtggggctcacttcatcagagtttgaagcccaaatgaaacgctgaagtgactgagaacctggcttcagtatattttctgctggggcttaataaagcagtagacagggcttgttccatccctctgtgctcagctgcatttcctgctggggtcctggttcctcaggagagagagaccacagggtgagagtgagccaggaacagcaaggacgttgattggttggggcaggggggccagagtagctgatgtaggagtactgggaggccagacggcacgaggtctccaaggccccagcaaagccatggcttctacccctagttcccctgacaggaagttcttggcgggtttggagccaggggatggcatggagtgatgtggctttgaagggtcctctggctgctgagctgggatgaggcaggtaagggtggaacaggaggggtggggaggaagccggggcagtcaccgagtgaccaccaagaggaagacccaccccacggcggggacagatgcggggtacgttaaagggagagccagagaactcatggggtgaggatggagtccgaggagactgctgggagccgccgtgtgggtcagagatggagaaggctgagtgcagcaaggtggggggtgactgggacccagcctttgggcctccccagccagagcagcccagcaacagtgtgtcctgtggtcataaaactccagggacctctatcctccaggagtctcagcctttccctgggcgcaggcccaccttggcatggccgcctcaggcctccatggagggagctgctatgtccccaccagattggccccgtgcggctgctggcttctgtagaggctgcccagaggggccaggtggcacaaataagagaggggagatggggggcagccaggagaggaggtgtcccttcctcgcccagacacagcgcgcttctctctggcctttcccgaggcctgtgagtgcctcaggaagcagctgggccctctgggaaggctgtgttcagcttaggaacataccgcctgtatctgctgtccctcccctgcccccctgccccccccaccgccttccctttttccctgtcttccttaaagtttcactcctgaataaaacttcactttgccttaaa

SEQ ID NO: 81 - DNA, 2248 bp, Homo sapiens; identical to SEQ ID NO: 80

SEQ ID NO: 82 - DNA, 1366 bp, Homo sapiens
aggagctggcggagggcgttcgtcctgggagctgcacttgctccgtcgggtcgccggcttcaccggaccgcaggctcccggggcagggccggggccagagctcgcgtgtcggcgggacatgcgctgcgtcgcctctaacctcgggctgtgctctttttccaggtggcccgccggtttctgagccttctgccctgcggggacacggtctgcaccctgcccgcggccacggaccatgaccatgaccctccacaccaaagcatctgggatggccctactgcatcagatccaagggaacgagctggagcccctgaaccgtccgcagctcaagatccccctggagcggcccctgggcgaggtgtacctggacagcagcaagcccgccgtgtacaactaccccgagggcgccgcctacgagttcaacgccgcggccgccgccaacgcgcaggtctacggtcagaccggcctcccctacggccccgggtctgaggctgcggcgttcggctccaacggcctggggggtttccccccactcaacagcgtgtctccgagcccgctgatgctactgcacccgccgccgcagctgtcgcctttcctgcagccccacggccagcaggtgccctactacctggagaacgagcccagcggctacacggtgcgcgaggccggcccgccggcattctacaggacataacgactatatgtgtccagccaccaaccagtgcaccattgataaaaacaggaggaagagctgccaggcctgccggctccgcaaatgctacgaagtgggaatgatgaaaggtggaaccagggaaaatgtgtagagggcatggtggagatcttcgacatgctgctggctacatcatctcggttccgcatgatgaatctgcagggagaggagtttgtgtgcctcaaatctattattttgcttaattctggagtgtacacatttctgtccagcaccctgaagtctctggaagagaaggaccatatccaccgagtcctggacaagatcacagacactttgatccacctgatggccaaggcaggcctgaccctgcagcagcagcaccagcggctggcccagctcctcctcatcctctcccacatcaggcacatgagtaacaaaggcatggagcatctgtacagcatgaagtgcaagaacgtggtgcccctctatgacctgctgctggagatgctggacgcccaccgcctacatgcgcccactagccgtggaggggcatccgtggaggagacggaccaaagccacttggccactgcgggctctacttcatcgcattccttgcaaaagtattacatcacgggggaggcagagggtttccctgccacagtctgagagctccctggc

SEQ ID NO: 83 - DNA, 2160 bp, Homo sapiens
agccccctgcccctcgccgccccccgccgcctgcctgggccgggccgaggatgcggcgcagcgcctcggcggccaggcttgctcccctccggcacgcctgctaacttcccccgctacgtccccgttcgcccgccgggccgccccgtctccccgcggcctccgggtccgggtcctccaggacggccaggccgtgccgccgtgtgccctccgccgctcgcccgcgcgccgcgcgctccccgcctgcgcccagcgccccgcgcccgcgccccagtcctcgggcggtccatgctgcccctctgcctcgtggccgccctgctgctggccgccgggcccgggccgagcctgggcgacgaagccatccactgcccgccctgctccgaggagaagctggcgcgctgccgcccccccgtgggctgcgaggagctggtgcgagaggcgggctgcggctgttgcgccacttgcgccctgggcttggggatgccctgcggggtgtacaccccccgttgcggctcgggcctgcgctgctacccgccccgaggggtggagaagcccctgcacacactgatgcacgggcaaggcgtgtgcatggagctggcggagatcgaggccatccaggaaagcctgcagccctctgacaaggacgagggtgaccaccccaacaacagcttcagcccctgtagcgcccatgaccgcaggtgcctgcagaagcacttcgccaaaattcgagaccggagcaccagtgggggcaagatgaaggtcaatggggcgccccgggaggatgcccggcctgtgccccagggctcctgccagagcgagctgcaccgggcgctggagcggctggccgcttcacagagccgcacccacgaggacctctacttcatccccatccccaactgcgaccgcaacggcaacttccaccccaagcagtgtcacccagctctggatgggcagcgtggcaagtgctggtgtgtggaccggaagacgggggtgaagcttccggggggcctggagccaaagggggagctggactgccaccagctggctgacagctttcgagagtgaggcctgccagcaggccagggactcagcgtcccctgctactcctgtgctctggaggctgcagagctgacccagagtggagtctgagtctgagtcctgtctctgcctgcggcccagaagtttccctcaaatgcgcgtgtgcacgtgtgcgtgtgcgtgcgtgtgtgtgtgtttgtgagcatgggtgtgcccttggggtaagccagagcctggggtgttctctttggtgttacacagcccaagaggactgagactggcacttagcccaagaggtctgagccctggtgtgtttccagatcgatcctggattcactcactcactcattccttcactcatccagccacctaaaaacatttactgaccatgtactacgtgccagctctagttttcagccttgggaggttttattctgacttcctctgattttggcatgtggagacactcctataaggagagttcaagcctgtgggagtagaaaaatctcattcccagagtcagaggagaagagacatgtaccttgaccatcgtccttcctctcaagctagcccagagggtgggagcctaaggaagcgtggggtagcagatggagtaatggtcacgaggtccagacccactcccaaagctcagacttgccaggctccctttctcttcttccccaggtccttcctttaggtctggttgttgcaccatctgcttggttggctggcagctgagagccctgctgtgggagagcgaagggggtcaaaggaagacttgaagcacagagggctagggaggtggggtacatttctctgagcagtcagggtgggaagaaagaatgcaagagtggactgaatgtgcctaatggagaagacccacgtgctaggggatgaggggcttcctgggtcctgttcccctaccccatttgtggtcacagccatgaagtcaccgggatgaacctatccttccagtggctcgctccctgtagctctgcctccctctccatatctccttcccctacacctccctccccacacctccctactcccctgggcatcttctggcttgactggatggaaggagacttaggaacctaccagttggccatgatgtcttttctt

SEQ ID NO: 84 - DNA, 522 bp, Homo sapiens
  modified_base (304)..(483): n = a, c, g or t/u
gcggccgcagtccgtgcacacgtggcgccgttggccggcctgagcatccatgctgggtatgggtgccgggggctgtgctcctgtggtcgggtcccaggcagcatttttgggtggctgtgcccgtgccggggccacgctaatagctgggtcagggttgcgttccaccagcacttcaggactctccttcacaggagcctttctaggccctttggctcttgggacttcctccggttcctcttccttcctgtttgggacatctcctctccgagctcctcccagtctttcccccttctcaggatcctgngcggcggngctccaagcctcactctcctgttccatccaagagatgagggctggtttggngcctgggaatccgagcgcgcccaggtggccgtaggtctcctgcatcacgtcccggtacagagccctctgcgcgggccgcagacagccccactcctcggggaagaagtacacggtcacgtncgcgaagctcacagtcccgggcttcctgcacccagccgg

SEQ ID NO: 85 - DNA, 3284 bp, Homo sapiens
gagcggtgccgcaccggccgcgggcgcagggagtattatgggctgtgggtgccgctgagcaagatggagctgtctgcagtgggcgagcgggtcttcgcggccgaatccatcatcaaacggcggatccgaaagggacgcatcgagtacctggtgaaatggaaggggtgggcgatcaagtacagcacttgggagcccgaggagaacatcctggactcgcggctcattgcagccttcgaacaaaaggagagggagcgtgagctgtatgggcccaagaagaggggacccaaacccaaaactttcctcctgaaggcgcgggcccaggccgaggccctccgcatcagtgatgtgcatttctctgtcaagccgagcgccagtgcctcctcgcccaagctgcactccagcgcagccgtgcaccggctcaagaaggacatccgccgctgccaccgtatgtcccgccgtcccctgccccgcccggacccgcaggggggcagccccggactgcgcccgcccatttcgcccttctcggagacggtgcgcatcatcaaccgcaaggtgaagccgcgggagcccaagcggaaccgcatcatcctgaacctgaaggtgatcgacaagggcgctggcggcgggggcgccgggcagggggccggggcgctggcccgccccaaagtcccctcgcggaaccgcgttataggcaagagcaagaagttcagcgagagcgtcctgcgtacacagatccgccacatgaagttcggcgcctttgcgctgtacaagcctccgcccgcccccctggtagccccgtcccccggcaaggctgaggcctcagccccgggccctgggctacttctggccgcccccgccgccccctacgacgcccgcagctctggctcctccggctgcccctcgcctacaccacagtcctctgaccccgacgacacgccccccaagctcctccccgagaccgtgagcccatccgcccccagctggcgcgagccggaggtgctcgacctgtccctccctcccgagtcggcagccaccagcaagcgggcaccgcctgaggtcacagctgctgccggcccggcacctcccacggcccctgagcccgccggtgcctcctccgagcccgaggctggggactggcgccccgagatgtcaccctgctccaatgtggtcgtcaccgatgtcaccagcaacctcctgacggtcacaatcaaggaattctgcaaccctgaggatttcgagaaggtggctgctggggtagcaggcgccgctgggggcggtggcagcattggggcgagcaagtgagggggctccaccaaggaggggggcttgggggggccctcctgcccgaagtcatactcttgctcccaccccacccttgcccccagccctctctccctgtgctttgcttgtctcaaatggctcggtgttgacccagggatggggctgggtagttggggtcccagaaagccgggggtaggggccaccctggaatggggcaggggaagggcacaccccctgcccatgcatggtagcccactgggtggtttctggaaagccctagaaactagggttcctctgccccttccacatcccacctgtctctctagcttgcttcctgctctcctgtgcggcgtctgatttctcggtgctaacctggcagctgtggggcccttaggagccccccaccgagggtggacacagtccctttccttcctgcagatgcctaggcaggaggagggcttcctgcctgtttggcaaagtcccaggcagaggccaaggatgaggcctgactcggctcctccctccacatcagccagggcatcagaagttgggccagggcggggtcttccctgctcgattttggacgaggcctaagtagaccccctatgccctgccccagccctggctctttcctaaccccctcaacggtgggaggaactggcagagggtgcgcctggccacagcctccccgcatctaaaggccccttcagttcttgaccaaaggtgctacgagaacctgccgtggaaacttccagttgtgcgtctgccccactcgctgtgtttgtccgtgggttcatacatgcattgggtgctaggccccaggctgccgggtggcaccctttacagttcctttgaacaggggcattgaaggcctggactgcctctcgcctcagtaggcctggggaccaggcttgggtctggaggtttgctgtggaagtcaccaggcctcccctcctggcccaggtgtgctgggggcaccgtgccccccacccccctgccctcctcagggtggtcagcccaacctgtcggaccttcacttcacatcatggtggggaccgagatagagagggagaccccattccaagctccctcttcctcccggtgtttggggaggatgctgaagaatccattcccgagggcctcccggcttgtcccagcccctcttttgcttctgaccacggaggctttctcacagcccagcctgcctgaagcaaaggaggctcccgtgtcctgggcagcttctgtttccctctgctgcctgggagctgaggcacccgtgccagtggcagaggccacagccccagccttaggccaggccctgggagggcaggcaggcaaaggggagaccagagggtctgtgttctccaggagaatgagggtgttggtcccagaattgggaccggggccccgctggccagccctgggccacttcccgggtctccattgtgcgtgggtggcgtgttccaggcgtggctggagctggcttcctggctgtgctgccatgggcccctccctcagaagcacgttggcaggaggccgatcagaaccctagcgcctttggtcctaagaatgggaggctgccttccttcccaatctccctgccagggcccacagcgtggccctagccctcccctccccgggatgtagaacggggaccctcgcagggttggggcgggggctgatactcctcggcccctccctaccctgccctgtgtgttggctttgtggccgtccaagtgccaattggcttttcgcccaaataagggctggtatttctcctctgtccttggaggtgatttccccctgaccccctcccccaggtgagtgaccacctgggtgccagttacaggtgtttccagagaccatagaaatgtgttttcctgagagttcgtgtcattcgtgacttttttgtaaagaagttgtgttttcagaggtgattttatgacaggaaagtgaaagaattagttttgcaaaaaaacaaaaacaaaaaaaaaaaaaaaaaa

SEQ ID NO: 86 - DNA, 5484 bp, Homo sapiens
aattgtcagcacgggatctgagacttccaaaaaatgaagccggcgacaggactttgggtctgggtgagccttctcgtggcggcggggaccgtccagcccagcgattctcagtcagtgtgtgcaggaacggagaataaactgagctctctctctgacctggaacagcagtaccgagccttgcgcaagtactatgaaaactgtgaggttgtcatgggcaacctggagataaccagcattgagcacaaccgggacctctccttcctgcggtctgttcgagaagtcacaggctacgtgttagtggctcttaatcagtttcgttacctgcctctggagaatttacgcattattcgtgggacaaaactttatgaggatcgatatgccttggcaatatttttaaactacagaaaagatggaaactttggacttcaagaacttggattaaagaacttgacagaaatcctaaatggtggagtctatgtagaccagaacaaattcctttgttatgcagacaccattcattggcaagatattgttcggaacccatggccttccaacttgactcttgtgtcaacaaatggtagttcaggatgtggacgttgccataagtcctgtactggccgttgctggggacccacagaaaatcattgccagactttgacaaggacggtgtgtgcagaacaatgtgacggcagatgctacggaccttacgtcagtgactgctgccatcgagaatgtgctggaggctgctcaggacctaaggacacagactgctttgcctgcatgaatttcaatgacagtggagcatgtgttactcagtgtccccaaacctttgtctacaatccaaccacctttcaactggagcacaatttcaatgcaaagtacacatatggagcattctgtgtcaagaaatgtccacataactttgtggtagattccagttcttgtgtgcgtgcctgccctagttccaagatggaagtagaagaaaatgggattaaaatgtgtaaaccttgcactgacatttgcccaaaagcttgtgatggcattggcacaggatcattgatgtcagctcagactgtggattccagtaacattgacaaattcataaactgtaccaagatcaatgggaatttgatctttctagtcactggtattcatggggacccttacaatgcaattgaagccatagacccagagaaactgaacgtctttcggacagtcagagagataacaggtttcctgaacatacagtcatggccaccaaacatgactgacttcagtgttttttctaacctggtgaccattggtggaagagtactctatagtggcctgtccttgcttatcctcaagcaacagggcatcacctctctacagttccagtccctgaaggaaatcagcgcaggaaacatctatattactgacaacagcaacctgtgttattatcataccattaactggacaacactcttcagcacaatcaaccagagaatagtaatccgggacaacagaaaagctgaaaattgtactgctgaaggaatggtgtgcaaccatctgtgttccagtgatggctgttggggacctgggccagaccaatgtctgtcgtgtcgccgcttcagtagaggaaggatctgcatagagtcttgtaacctctatgatggtgaatttcgggagtttgagaatggctccatctgtgtggagtgtgacccccagtgtgagaagatggaagatggcctcctcacatgccatggaccgggtcctgacaactgtacaaagtgctctcattttaaagatggcccaaactgtgtggaaaaatgtccagatggcttacagggggcaaacagtttcattttcaagtatgctgatccagatcgggagtgccacccatgccatccaaactgcacccaagggtgtaacggtcccactagtcatgactgcatttactacccatggacgggccattccactttaccacaacatgctagaactcccctgattgcagctggagtaattggtgggctcttcattctggtcattgtgggtctgacatttgctgtttatgttagaaggaagagcatcaaaaagaaaagagccttgagaagattcttggaaacagagttggtggaaccattaactcccagtggcacagcacccaatcaagctcaacttcgtattttgaaagaaactgagctgaagagggtaaaagtccttggctcaggtgcttttggaacggtttataaaggtatttgggtacctgaaggagaaactgtgaagattcctgtggctattaagattcttaatgagacaactggtcccaaggcaaatgtggagttcatggatgaagctctgatcatggcaagtatggatcatccacacctagtccggttgctgggtgtgtgtctgagcccaaccatccagctggttactcaacttatgccccatggctgcctgttggagtatgtccacgagcacaaggataacattggatcacaactgctgcttaactggtgtgtccagatagctaagggaatgatgtacctggaagaaagacgactcgttcatcgggatttggcagcccgtaatgtcttagtgaaatctccaaaccatgtgaaaatcacagattttgggctagccagactcttggaaggagatgaaaaagagtacaatgctgatggaggaaagatgccaattaaatggatggctctggagtgtatacattacaggaaattcacccatcagagtgacgtttggagctatggagttactatatgggaactgatgacctttggaggaaaaccctatgatggaattccaacgcgagaaatccctgatttattagagaaaggagaacgtttgcctcagcctcccatctgcactattgacgtttacatggtcatggtcaaatgttggatgattgatgctgacagtagacctaaatttaaggaactggctgctgagttttcaaggatggctcgagaccctcaaagatacctagttattcagggtgatgatcgtatgaagcttcccagtccaaatgacagcaagttctttcagaatctcttggatgaagaggatttggaagatatgatggatgctgaggagtacttggtccctcaggctttcaacatcccacctcccatctatacttccagagcaagaattgactcgaataggagtgaaattggacacagccctcctcctgcctacacccccatgtcaggaaaccagtttgtataccgagatggaggttttgctgctgaacaaggagtgtctgtgccctacagagccccaactagcacaattccagaagctcctgtggcacagggtgctactgctgagatttttgatgactcctgctgtaatggcaccctacgcaagccagtggcaccccatgtccaagaggacagtagcacccagaggtacagtgctgaccccaccgtgtttgccccagaacggagcccacgaggagagctggatgaggaaggttacatgactcctatgcgagacaaacccaaacaagaatacctgaatccagtggaggagaacccttttgtttctcggagaaaaaatggagaccttcaagcattggataatcccgaatatcacaatgcatccaatggtccacccaaggccgaggatgagtatgtgaatgagccactgtacctcaacacctttgccaacaccttgggaaaagctgagtacctgaagaacaacatactgtcaatgccagagaaggccaagaaagcgtttgacaaccctgactactggaaccacagcctgccacctcggagcacccttcagcacccagactacctgcaggagtacagcacaaaatatttttataaacagaatgggcggatccggcctattgtggcagagaatcctgaatacctctctgagttctccctgaagccaggcactgtgctgccgcctccaccttacagacaccggaatactgtggtgtaagctcagttgtggttttttaggtggagagacacacctgctccaatttccccacccccctctctttctctggtggtcttccttctaccccaaggccagtagttttgacacttcccagtggaagatacagagatgcaatgatagttatgtgcttacctaacttgaacattagagggaaagactgaaagagaaagataggaggaaccacaatgtttcttcatttctctgcatgggttggtcaggagaatgaaacagctagagaaggaccagaaaatgtaaggcaatgctgcctactatcaaactagctgtcactttttttctttttctttttctttctttgtttctttcttcctcttctttttttttttttttttaaagcagatggttgaaacacccatgctatctgttcctatctgcaggaactgatgtgtgcatatttagcatccctggaaatcataataaagtttccattagaacaaaagaataacattttctataacatatgatagtgtctgaaattgagaatccagtttctttccccagcagtttctgtcctagcaagtaagaatggccaactcaactttcataatttaaaaatctccattaaagttataactagtaattatgttttcaacactttttggtttttttcattttgttttgctctgaccgattcctttatatttgctcccctatttttggctttaatttctaattgcaaagatgtttacatcaaagcttcttcacagaatttaagcaagaaatattttaatatagtgaaatggccactactttaagtatacaatctttaaaataagaaagggaggctaatatttttcatgctatcaaattatcttcaccctcatcctttacatttttcaacatttttttttctccataaatgacactacttgataggccgttggttgtctgaagagtagaagggaaactaagagacagttctctgtggttcaggaaaactactgatactttcaggggtggcccaatgagggaatccattgaactggaagaaacacactggattgggtatgtctacctggcagatactcagaaatgtagtttgcacttaagctgtaattttatttgttctttttctgaactccattttggattttgaatcaagcaatatggaagcaaccagcaaattaactaatttaagtacatttttaaaaaaagagctaagataaagactgtggaaatgccaaaccaagcaaattaggaaccttgcaacggtatccagggactatgatgagaggccagcacattatcttcatatgtcacctttgctacgcaaggaaatttgttcagttcgtatacttcgtaagaaggaatgcgagtaaggattggcttgaattccatggaatttctagtatgagactatttatatgaagtagaaggtaactctttgcacataaattggtataataaaaagaaaaacacaaacattcaaagcttagggataggtccttgggtcaaaagttgtaaataaatgtgaaacatcttctc

SEQ ID NO: 87 - DNA, 6829 bp, Homo sapiens
cttctctcccagggcggtgcgacccggagctccagcgcccgagtctccacttcgtttgctgaaacttgctttctaccagctaagaaccatgctgcgagtgattgtggaatctgccagcaatatccctaaaacgaaatttggcaagccggatcctattgtttctgtcatttttaaggatgagaaaaagaaaacaaagaaagttgataatgaattgaaccctgtctggaatgagattttggagtttgacttgaggggtataccactggacttttcatcttcccttgggattattgtgaaagattttgagacaattggacaaaataaattaattggcacggcgactgtagccctgaaggacctgactggtgaccagagcagatccctgccgtacaagctgatctccctgctaaatgaaaaagggcaagatactggggccaccattgacttggtgatcggctatgatccgccttctgctccacatccaaatgacctgagcgggcccagcgtgccaggcatgggaggagatggggaagaagatgaaggtgatgaagacaggttggacaatgcagtcaggggccctgggcccaaggggccagttgggacggtgtcggaagctcagcttgctcggaggctcaccaaagtaaagaacagccggcggatgctgtcaaataagccacaggacttccagatccgcgtccgagtgattgagggccgacagttaagtggtaacaacataaggcctgtggtcaaagttcacgtctgtggccagacacaccgaacaagaatcaagagaggaaacaaccctttttttgatgagttgtttttctacaatgtcaacatgaccccttctgaattgatggatgagatcatcagcatccgggtttataattctcactctctgcgggcagattgtctgatgggggaatttaagattgatgttggatttgtttatgatgaacctggccatgctgtcatgagaaagtggcttcttctcaatgacccggaagataccagttcaggttctaaaggttatatgaaagtcagcatgtttgtcctgggaaccggagatgagcctcctcctgagagacgagatcgtgataatgacagtgatgatgtggagagtaatttgttactccctgctggcattgccctccggtgggtgaccttcttgctgaaaatctaccgagctgaggacatcccccagatggatgatgccttctcacagacagtaaaggaaatatttggaggcaatgcagataagaaaaatctcgtggatccttttgtagaagtttcctttgctggaaaaaaggtttgtacaaacataattgagaaaaatgcaaacccagagtggaatcaggtcgtcaatcttcagatcaagtttccttcagtgtgtgaaaaaataaaactaacaatatatgactgggaccgtcttactaaaaatgatgtagttggaacaacatatctacacctctctaaaattgctgcctctggtggggaagtggaagatttctcatcttcgggaactggggctgcatcatatacagtaaacacaggagaaacagaggtaggctttgttccaacgtttggaccttgttacctgaatctttatggaagccccagggagtacacgggattcccagacccctatgatgagctgaatactggaaagggggaaggagttgcctacagaggcaggatcttggttgaattagccacttttcttgagaagacaccaccagataaaaagcttgagcccatttcaaatgatgacctgctggttgttgagaaataccagcgaaggcggaagtacagcctgtctgccgtgtttcattcagccaccatgttgcaagatgttggtgaggccattcagtttgaagtcagcattgggaactatggcaacaagtttgacaccacctgtaagcctttggcatcaacaactcagtacagccgtgctgtatttgatggcaactactattattacttgccttgggcccacaccaagccagttgttaccctgacttcatactgggaggatattagtcatcgcctggatgcggtgaacactctcctagctatggcagaacggctgcaaacaaatatagaagctctaaaatcagggatacaaggtaaaattcctgcaaaccagctggctgaattgtggctgaagctgatagatgaagttatagaagacacgagatacacgttgcctctcacagaaggaaaagccaacgtcacagttctcgatactcagatccgaaagctgcggtccaggtctctctcccaaatacatgaggcggctgtgaggatgaggtcggaagccacagatgtgaagtccacactggcagaaattgaggactggcttgataaattaatgcagctgactgaagagccacagaacagcatgcctgacatcatcatctggatgatccggggagagaagagactggcctatgcacgaattcccgcacatcaggtcttgtactccaccagtggtgagaatgcatctggaaaatactgtgggaaaacccaaaccatctttctgaagtatccacaggagaaaaacaacgggccaaaggtgcctgtggagttgcgagtgaacatctggctaggcttaagtgctgtggagaagaagtttaacagcttcgcagaaggaactttcaccgtctttgctgaaatgtatgaaaatcaagctctcatgtttggaaaatggggtacttctggattagtaggacgtcataagttttctgatgtcacaggaaaaataaaactcaagagggaattttttctgcctccaaaaggctgggaatgggaaggagagtggatagttgatcctgaaagaagcttgctgactgaggcagatgcaggtcacacggagttcactgatgaagtctatcagaacgagagccgctaccccgggggcgactggaagccggccgaggacacctacacggatgcgaacggcgataaagcagcatcacccagcgagttgacttgtcctccaggttgggaatgggaagatgatgcatggtcttatgacataaatcgagcggtggatgagaaaggctgggaatatggaatcaccattcctcctgatcataagcccaaatcctgggttgcagcagagaaaatgtaccacactcatagacggcgaaggctggtccgaaaacgcaagaaagatttaacacagactgcttcaagcaccgcaagggccatggaggaattgcaagaccaagagggctgggaatatgcttctctaattggctggaaatttcactggaaacaacgtagttcagataccttccgccgcagacgctggaggagaaaaatggctccttcagaaacacatggtgcagctgccatctttaaacttgaaggtgcccttggggcagacactaccgaagatggggatgagaagagcctggagaaacagaagcacagtgccaccactgtgttcggagcaaacacccccattgtttcctgcaattttgacagagtctacatctaccatctgcgctgctatgtctatcaagccagaaacctcttggctttagataaggatagcttttcagatccatatgctcatatctgtttcctccatcggagcaaaaccactgagatcatccattcaaccctgaatcccacgtgggaccaaacaattatattcgatgaagttgaaatctatggggaaccccaaacagttctacagaatccacccaaagttatcatggaactttttgacaatgaccaagtgggcaaagatgaatttttaggacgaagcattttctctcctgtggtgaaactgaactcagaaatggacatcacacccaaacttctctggcacccagtaatgaatggagacaaagcctgcggggatgttcttgtaactgcagagctgattctgaggggcaaggatggctccaaccttcccattcttccccctcaaagggcgccaaatctatacatggtcccccaggggatcaggcctgtggtccagctcactgccattgagattctagcttggggcttaagaaatatgaaaaacttccagatggcttctatcacatcccccagtcttgttgtggagtgtggaggagaaagggtggaatcggtggtgatcaaaaaccttaagaagacacccaactttccaagttctgttctcttcatgaaagtgttcttgcccaaggaggaattgtacatgcccccactggtgatcaaggtcatcgaccacaggcagtttgggcggaagcctgtcgtcggccagtgcaccatcgagcgcctggaccgctttcgctgtgacccttatgcagggaaagaggacatcgtcccacagctcaaagcctcccttctgtctgccccaccatgccgggacatcgttatcgaaatggaagacaccaaaccattactggcttctaagctgacagaaaaggaggaagaaatcgtggactggtggagtaaattttatgcttcctcaggggaacatgaaaaatgcggacagtatattcagaaaggctattccaagctcaagatatataattgtgaactagaaaatgtagcagaatttgagggcctgacagacttctcagatacgttcaagttgtaccgaggcaagtcggatgaaaatgaagatccttctgtggttggagagtttaagggctcctttcggatctaccctctgccggatgaccccagcgtgccagcccctcccagacagtttcgggaattacctgacagcgtcccacaggaatgcacggttaggatttacattgttcgaggcttagagctccagccccaggacaacaatggcctgtgtgacccttacataaaaataacactgggcaaaaaagtcattgaagaccgagatcactacattcccaacactctcaacccagtctttggcaggatgtacgaactgagctgctacttacctcaagaaaaagacctgaaaatttctgtctatgattatgacacctttacccgggatgaaaaagtaggagaaacaattattgatctggaaaaccgattcctttcccgctttgggtcccactgcggcataccagaggagtactgtgtttctggagtcaatacctggcgagatcaactgagaccaacacagctgcttcaaaatgtcgccagattcaaaggcttcccacaacccatcctttccgaagatgggagtagaatcagatatggaggacgagactacagcttggatgaatttgaagccaacaaaatcctgcaccagcacctcggggcccctgaagagcggcttgctcttcacatcctcaggactcaggggctggtccctgagcacgtggaaacaaggactttgcacagcaccttccagcccaacatttcccagggaaaacttcagatgtgggtggatgttttccccaagagtttggggccaccaggccctcctttcaacatcacaccccggaaagccaagaaatactacctgcgtgtgatcatctggaacaccaaggacgttatcttggacgagaaaagcatcacaggagaggaaatgagtgacatctacgtcaaaggctggattcctggcaatgaagaaaacaaacagaaaacagatgtccattacagatctttggatggtgaagggaattttaactggcgatttgttttcccgtttgactaccttccagccgaacaactctgtatcgttgcgaaaaaagagcatttctggagtattgaccaaacggaatttcgaatcccacccaggctgatcattcagatatgggacaatgacaagttttctctggatgactacttgggtttcctagaacttgacttgcgtcacacgatcattcctgcaaaatcaccagagaaatgcaggttggacatgattccggacctcaaagccatgaacccccttaaagccaagacagcctccctctttgagcagaagtccatgaaaggatggtggccatgctacgcagagaaagatggcgcccgcgtaatggctgggaaagtggagatgacattggaaatcctcaacgagaaggaggccgacgagaggccagccgggaaggggcgggacgaacccaacatgaaccccaagctggacttaccaaatcgaccagaaacctccttcctctggttcaccaacccatgcaagaccatgaagttcatcgtgtggcgccgctttaagtgggtcatcatcggcttgctgttcctgcttatcctgctgctcttcgtggccgtgctcctctactctttgccgaactatttgtcaatgaagattgtaaagccaaatgtgtaacaaaggcaaaggcttcatttcaagagtcatccagcaatgagagaatcctgcctctgtagaccaacatccagtgtgattttgtgtctgagaccacaccccagtagcaggttacgccatgtcaccgagccccattgattcccagagggtcttagtcctggaaagtcaggccaacaagcaacgtttgcatcatgttatctcttaagtattaaaagttttattttctaaagtttaaatcatgtttttcaaaatatttttcaaggtggctggttccatttaaaaatcatctttttatatgtgtcttcggttctagacttcagcttttggaaattgctaaatagaattcaaaaatctctgcatcctgaggtgatatacttcatatttgtaatcaactgaaagagctgtgcattataaaatcagttagaatagttagaacaattcttatttatgcccacaaccattgctatattttgtatggatgtcataaaagtctatttaacctctgtaatgaaactaaataaaaatgtttcacctttaaaaaaaaaaaaaaaaaaaaaa

SEQ ID NO: 88 - DNA, 655 bp, Homo sapiens
ttctcaaaaacagtattatctttattaaaaaatggatagatatagcagcacttacaaaacagttcatcaaaggcattgtacactgtcaactgataatgtggagagggcagccccctgcccagctggctatgggctctgcacaacgcttgcccgcaaccacctgctccacttggtacaacggagcccagaacacctgcgaggagagccacgccaccgtggccctccacagcttcaagcttttgttgttgtaggagtcccttaggtcaagtagcaccttccatagcagcatcgggagcacgcactggtgtctggaggtggctggtgtacttgacccacttatttaaaaaaaacctataagcattcaataaaaaacactttgccctgtttgatgccatccacagaaatacttctgttgtggaagaaacactcttccattcagatatctgtaaaagcaaacgcacgcctccgctgcaacagacagaagagaacgtggagcaggcgcgcaactgtctttggtggagaaggatgggggtgcacgccatttccggcccactgctctgcttcttaccgctctgtgggcgggtgaggagccccactggggagaggagaagccctatttgttcagaccacatgggcttctttgctcggctttgtc

SEQ ID NO: 89 - DNA, 498 bp, Homo sapiens
agtagaaacaggattttaatataatattcaagtctagcatttgctatttacaacaaataaatattgcccctccccaatcagtaaacaaacattttttttttctttttgctttttatacaaatattcaatcaccccacccccaccccaaatcctccttcctcactaacccccgtcttgcatggtctcgtaaagcccaggacgcagtggtgaatggcacttgcagtggcatgagattcaacatcgatgggactcagctgggactgtcctcactcaccgggtgcagagtctggtccatgaagagggtttctctctctgctcccaggggagggctggggtaagcggtgggtgagactccctcactctcagttggccctgatgatggaatctttggtgcagcctgagaaaggctagagtggtgggaggggccgggacccctgcgaaggtcacaggccagtgcctgtgggcatgagagaactgcagtggtcacagtgggtgctc

SEQ ID NO: 90 - DNA, 1539 bp, Homo sapiens
  modified_base (1536): n = a, c, g or t/u
tgcaggagttcatgatcctcccagtcggtgcagcaaacttcagggaagccatgcgcattggagcagaggtttaccacaacctgaagaatgtcatcaaggagaaatatgggaaagatgccaccaatgtgggggatgaaggcgggtttgctcccaacatcctggagaataaagaaggcctggagctgctgaagactgctattgggaaagctggctacactgataaggtggtcatcggcatggacgtagcggcctccgagttcttcaggtctgggaagtatgacctggacttcaagtctcccgatgaccccagcaggtacatctcgcctgaccagctggctgacctgtacaagtccttcatcaaggactacccagtggtgtctatcgaagatccctttgaccaggatgactggggagcttggcagaagttcacagccagtgcaggaatccaggtagtgggggatgatctcacagtgaccaacccaaagaggatcgccaaggccgtgaacgagaagtcctgcaactgcctcctgctcaaagtcaaccagattggctccgtgaccgagtctcttcaggcgtgcaagctggcccaggccaatggttggggcgtcatggtgtctcatcgttcgggggagactgaagataccttcatcgctgacctggttgtggggctgtgcactgggcagatcaagactggtgccccttgccgatctgagcgcttggccaagtacaaccagctcctcagaattgaagaggagctgggcagcaaggctaagtttgccggcaggaacttcagaaaccccttggccaagtaagctgtgggcaggcaagccttcggtcacctgttggctacacagacccctcccctcgtgtcagctcaggcagctcgaggcccccgaccaacacttgcaggggtccctgctagttagcgccccaccgccgtggagttcgtaccgcttccttagaacttctacagaagccaagctccctggagccctgttggcagctctagcttttgcagtcgtgtaatgggcccaagtcattgtttttctcgcctcactttccaccaagtgtctagagtcatgtgagcctcgtgtcatctccggggtggccacaggctagatccccggtggttttgtgctcaaaataaaaagcctcagtgacccatgagacggagatctcgccggctttacgttcacctcggtgtctgcagcaccctccgcttcctctcctaggcgacgagacccagtggctagaagttcaccatgtctattctcaagatccatgccagggagatctttgactctcgcgggaatcccactgttgaggttgatctcttcacctcaaaataaaaagcctcagtgaccctgcatttgagggttcagcagcatataccttcacactaggtttcagagcctgggaagaggaatattaagacatcttaacaacaaaccacaacattgcctgcatgtctaaaagaaaatatgggcctggtgtggtggctcacacctgtaatcccaacactttgggagcccgagncag

SEQ ID NO: 91 - DNA, 3143 bp, Homo sapiens
ctcgaggtaacctttggtggcgggaagagttcggaagttttcgcgccggggtggagtcatcctgggaacctccacgcgactttggtggaggtagttctttggcagcgggcatggcgggtaccgtggtgctggacgatgtggagctgcgggaggctcagagagattacctggacttcctggacgacgaggaagaccagggaatttatcagagcaaagttcgggagctgatcagtgacaaccaataccggctgattgtcaatgtgaatgacctgcgcaggaaaaacgagaagagggctaaccggcttctgaacaatgcctttgaggagctggttgccttccagcgggccttaaaggattttgtggcctccattgatgctacctatgccaagcagtatgaggagttctacgtaggactggaaggcagctttggctccaagcacgtctccccgcggactcttacctcctgcttcctcagctgtgtggtctgtgtggagggcattgtcactaaatgttctctagttcgtcccaaagtcgtccgcagtgtccactactgtcctgctactaagaagaccatagagcgacgttattctgatctcaccaccctggtggcctttccctccagctctgtctatcctaccaaggatgaggagaacaatccccttgagacagaatatggcctttctgtctacaaggatcaccagaccatcaccatccaggagatgccggagaaggccccagccggccagctcccccgctctgtggacgtcattctggatgatgacttggtggataaagcgaagcctggtgaccgggttcaggtggtgggaacctaccgttgccttcctggaaagaagggaggctacacctctgggaccttcaggactgtcctgattgcctgtaatgttaagcagatgagcaaggatgctcagccctctttctctgctgaggatatagccaagatcaagaagttcagtaaaacccgatccaaggatatctttgaccagctggccaagtcattggccccaagtatccatgggcatgactatgtcaagaaagcaatcctctgcttgctcttgggaggggtggaacgagacctagaaaatggcagccacatccgtggggacatcaatattcttctaataggagacccatccgttgccaagtctcagcttctgcggtatgtgctttgcactgcaccccgagctatccccaccactggccggggctcctctggagtgggtctgacggctgctgtcaccacagaccaggaaacaggagagcgccgtctggaagcaggggccatggtcctggctgaccgaggcgtggtttgcattgatgaatttgacaaaatgtctgacatggatcgcacagccatccatgaagtgatggagcagggtcgagtgaccattgccaaggctggcatccatgctcggctgaatgcccgctgcagtgttttggcagctgccaaccctgtctacggcaggtatgaccagtataagactccaatggagaacattgggctacaggactcactgctgtcacgatttgacttgctcttcatcatgctggatcagatggatcctgagcaggatcgggagatctcagaccatgtccttcggatgcaccgttacagagcacctggggagcaggatggcgatgctatgcccttgggtagtgctgtggatatcctggccacagatgatcccaactttagccaggaagatcagcaggacacccagatttatgagaagcatgacaaccttctacatgggaccaagaagaaaaaggagaagatggtgagtgcagcattcatgaagaagtacatccatgtggccaaaatcatcaagcctgtcctgacacaggagtcggccacctacattgcagaagagtattcacgcctgcgcagccaggatagcatgagctcagacaccgccaggacatctccagttacagcccgaacactggaaactctgattcgactggccacagcccatgcgaaggcccgcatgagcaagactgtggacctgcaggatgcagaggaagctgtggagttggtccagtatgcttactttaagaaggttctggagaaggagaagaaacgtaagaagcgaagtgaggatgaatcagagacagaagatgaagaggagaaaagccaagaggaccaggagcagaagaggaagagaaggaagactcgccagccagatgccaaagatggggattcatacgacccctatgacttcagtgacacagaggaggaaatgcctcaagtacacactccaaagacggcagactcacaggagaccaaggaatcccagaaagtggagttgagtgaatccaggttgaaggcattcaaggtggccctcttggatgtgttccgggaagctcatgcgcagtcaatcggcatgaatcgcctcacagaatccatcaaccgggacagcgaagagcccttctcttcagttgagatccaggctgctctgagcaagatgcaggatgacaatcaggtcatggtgtctgagggcatcatcttcctcatctgaggaggcctcgtctctgaacttgggttgtgccgagagagtttgttctgtgtttcccaccctctccctgacccaagtctttgcctctactcccttaacagtgttgaattcaactgaaggcgaggaatgttggtgatgaagctgagttcaggactcggtggaccctttgggaatgggtcatgaaagctgccatggggtgaggaaagaggagacagtgggagaggacaatgactattgcatcttcattgcaaaagcactggctcatccgccctacttcccatcccacacaaacccaattgtaaataacatatgacttctgagtacttttgggggcacaactgttttctgtttgctgtttttttgttttgttttttttctccagagcactttggtctagactaggctttgggtggttccaattggtggagagaagctctgaggcacgtcatgcaggtcaagaaagctttctttgcagtagcaccagttaaggtgaatatgtattgtatcacaaaacaaacccaatatccagatgaatatccgagatgttgaataaacttagccatttcgtacacatggtaaaaaaaaaaaaaaaaaaaaaaaaaaaaaaaa

SEQ ID NO: 92 - DNA, 1336 bp, Homo sapiens
ggggcttgcagagccggcgccggaggagacgcacgcagctgactttgtcttctccgcacgactgttacagaggtctccagagccttctctctcctgtgcaaaatggcaactcttaaggaaaaactcattgcaccagttgcggaagaagaggcaacagttccaaacaataagatcactgtagtgggtgttggacaagttggtatggcgtgtgctatcagcattctgggaaagtctctggctgatgaacttgctcttgtggatgttttggaagataagcttaaaggagaaatgatggatctgcagcatgggagcttatttcttcagacacctaaaattgtggcagataaagattattctgtgaccgccaattctaagattgtagtggtaactgcaggagtccgtcagcaagaaggggagagtcggctcaatctggtgcagagaaatgttaatgtcttcaaattcattattcctcagatcgtcaagtacagtcctgattgcatcataattgtggtttccaacccagtggacattcttacgtatgttacctggaaactaagtggattacccaaacaccgcgtgattggaagtggatgtaatctggattctgctagatttcgctaccttatggctgaaaaacttggcattcatcccagcagctgccatggatggattttgggggaacatggcgactcaagtgtggctgtgtggagtggtgtgaatgtggcaggtgtttctctccaggaattgaatccagaaatgggaactgacaatgatagtgaaaattggaaggaagtgcataagatggtggttgaaagtgcctatgaagtcatcaagctaaaaggatataccaactgggctattggattaagtgtggctgatcttattgaatccatgttgaaaaatctatccaggattcatcccgtgtcaacaatggtaaaggggatgtatggcattgagaatgaagtcttcctgagccttccatgtatcctcaatgcccggggattaaccagcgttatcaaccagaagctaaaggatgatgaggttgctcagctcaagaaaagtgcagataccctgtgggacatccagaaggacctaaaagacctgtgactagtgagctctaggctgtagaaatttaaaaactacaatgtgattaactcgagcctttagttttcatccatgtacatggatcacagtttgctttgatcttcttcaatatgtgaatttgggctcacagaatcaaagcctatgcttggtttaatgcttgcaatctgagctcttgaacaaataaaattaactattgtagtgcgaaaaaaaaaaaaaaaaaaaaaaaaaaaaa

SEQ ID NO: 93 - DNA, 1449 bp, Homo sapiens
ctggatagaacagctcaagccttgccacttcgggcttctcactgcagctgggcttggacttcggagttttgccattgccagtgggacgtctgagactttctccttcaagtacttggcagatcactctcttagcagggtctgcgcttcgcagccgggatgaagctggtttccgtcgccctgatgtacctgggttcgctcgccttcctaggcgctgacaccgctcggttggatgtcgcgtcggagtttcgaaagaagtggaataagtgggctctgagtcgtgggaagagggaactgcggatgtccagcagctaccccaccgggctcgctgacgtgaaggccgggcctgcccagacccttattcggccccaggacatgaagggtgcctctcgaagccccgaagacagcagtccggatgccgcccgcatccgagtcaagcgctaccgccagagcatgaacaacttccagggcctccggagctttggctgccgcttcgggacgtgcacggtgcagaagctggcacaccagatctaccagttcacagataaggacaaggacaacgtcgcccccaggagcaagatcagcccccagggctacggccgccggcgccggcgctccctgcccgaggccggcccgggtcggactctggtgtcttctaagccacaagcacacggggctccagcccccccgagtggaagtgctccccactttctttaggatttaggcgcccatggtacaaggaatagtcgcgcaagcatcccgctggtgcctcccgggacgaaggacttcccgagcggtgtggggaccgggctctgacagccctgcggagaccctgagtccgggaggcaccgtccggcggcgagctctggctttgcaagggcccctccttctgggggcttcgcttccttagccttgctcaggtgcaagtgccccagggggcggggtgcagaagaatccgagtgtttgccaggcttaaggagaggagaaactgagaaatgaatgctgagacccccggagcaggggtctgagccacagccgtgctcgcccacaaactgatttctcacggcgtgtcaccccaccagggcgcaagcctcactattacttgaactttccaaaacctaaagaggaaaagtgcaatgcgtgttgtacatacagaggtaactatcaatatttaagtttgttgctgtcaagattttttttgtaacttcaaatatagagatatttttgtacgttatatattgtattaagggcattttaaaagcaattatattgtcctcccctattttaagacgtgaatgtctcagcgaggtgtaaagttgttcgccgcgtggaatgtgagtgtgtttgtgtgcatgaaagagaaagactgattacctcctgtgtggaagaaggaaacaccgagtctctgtataatctatttacataaaatgggtgatatgcgaacagcaaacc

SEQ ID NO: 94 - DNA, 1023 bp, Homo sapiens
agcggtggctgccgggcgtggtgtcggtgggtcggttggtttttgtctcaccgttggtgtccgtgccgttcagttgcccgccatggctgagctggatccgttcggcgcccctgccggcgcccctggcggtcccgcgctggggaacggagtggccggcgccggcgaagaagacccggctgcggccttcttggcgcagcaagagagcgagattgcgggcatcgagaacgacgaggccttcgccatcctggacggcggcgcccccgggccccagccgcacggcgagccgccggggggtccggatgctgttgatggagtaatgaatggtgaatactaccaggaaagtaatggtccaacagacagttatgcagctatttcacaagtggatcgattgcagtcagagcctgaaagtatccgtaaatggagagaagaacaaatggaacgcttggaagcccttgatgccaattctcggaagcaagaagcagagtggaaagaaaaggcaataaaggagctagaagaatggtatgcaagacaggacgagcagctacagaaaacaaaagcaaacaacagggcagcagaagaagcctttgtaaatgacattgacgagtcgtccccaggcactgagtgggaacgggtggcccggctgtgtgactttaaccccaagtctagcaagcaggccaaagatgtctcccgcatgcgctcagtcctcatctccctcaagcaggccccgctggtgcactgaagagccaccctgtggaaacactacatctgcaatatcttaatcctactcagtgaagctcttcacagtcattggattaattatgttgagttcttttggaccaaacctttttgtctttagagttgttcattgtttgtgattgcatgtttccttccttcaactgtgttctccctggcattcagagaggagggagaggaggaagaggaaggggagggaagcttcccaagagtagcctcaacctgtgcttctgtgcattattctgagaataaatttctgtttcaaactgt

SEQ ID NO: 95 - DNA, 6734 bp, Homo sapiens
cccagttgtctgcgggctgcggggagctaagtccccagattggaggaggctggctctggtcttcgatgcacaggagtggccgttatggaacgcagcagcagcgtgcagggtcaaagacagccggccccccatgtcagtggtctaggatggccagtgaaggcaccaacatcccaagtcctgtggtgcgccagattgacaagcagtttctgatttgcagtatatgcctggaacggtacaagaatcccaaggttctcccctgtctgcacactttctgcgagaggtgcctgcagaactacattcctgcccacagtttaaccctctcctgcccagtgtgccgccagacctccatcctgcccgagaaaggggtggccgcgctccagaacaatttcttcatcacaaacctgatggacgtgctgcagcgaactccaggcagcaacgctgaggagtcttccatcctggagacagtcactgctgtggctgcgggaaagcctctctcttgcccaaaccacgatgggaatgtgatggaattttactgccagtcctgtgagactgccatgtgtcgggagtgcacggagggggagcacgcagagcaccccacagttccactcaaggatgtggtggaacagcacaaggcctcgctccaggtccagctggatgctgtcaacaaaaggctcccagaaatagattctgctcttcagttcatctctgaaatcattcatcagttaaccaaccaaaaggccagcatcgtggatgacattcattccacctttgatgagctccagaagactttaaatgtgcgcaagagtgtgctgcttatggaattggaggtcaactatggcctcaaacacaaagtcctccagtcgcagctggatactctgctccaggggcaggagagcattaagagctgcagcaacttcacagcgcaggccctcaaccatggcacggagaccgaggtcctactggtgaagaagcagatgagcgagaagctgaacgagctggccgaccaggacttccccttgcacccgcgggagaacgaccagctggatttcatcgtggaaaccgaggggctgaagaagtccatccacaacctcgggacgatcttaaccaccaacgccgttgcctcagagacagtggccacgggcgaggggctgcggcagaccatcatcgggcagcccatgtccgtcaccatcaccaccaaggacaaagacggtgagctgtgcaaaaccggcaacgcctacctcaccgccgaactgagcacccccgacgggagcgtggcagacggggagatcctggacaacaagaacggcacctatgagtttttgtacactgtccagaaggaaggggactttaccctgtctctgagactctatgaccagcacatccgaggcagcccgtttaagctgaaagtgatccgatccgctgatgtgtctcccaccacagaaggcgtgaagaggcgcgttaagtccccggggagcggccacgtcaagcagaaagctgtgaaaagacccgcaagcatgtacagcactggaaaacgaaaagagaatcccatcgaagacgatttgatctttcgagtgggtaccaaaggaagaaataaaggagagtttacaaatcttcagggggtagctgcatctacaaatggaaagatattaattgcagacagtaacaaccaatgtgtgcagatattttccaatgatggccagttcaaaagtcgttttggcatacggggacgctctccggggcagctgcagcggcccacaggagtggctgtacatcccagtggggacataatcattgccgattatgataataaatgggtcagcattttctcctccgatgggaaatttaagacaaaaattggatcaggaaagctgatgggacccaaaggagtttctgtggaccgcaatgggcacattattgttgtggacaacaaggcgtgctgcgtgtttatcttccagccaaacgggaaaatagtcaccaggtttggtagccgaggaaatggggacaggcagtttgcaggtccccattttgcagctgtaaatagcaataatgagattattattacagatttccataatcattctgtcaaggtgtttaatcaggaaggagaattcatgttgaagtttggctcaaatggagaaggaaatgggcagtttaatgctccaacaggtgtagcagtggattcaaatggaaacatcattgtggccgactggggaaacagcaggatccaggtttttgatgggagtggatcatttttgtcctacattaacacatctgctgacccactctatggcccccaaggcctggccctaacttcagatggtcatgttgtggttgcagactctggaaatcactgtttcaaagtctatcgatacttacagtaatggtgggcaggtggatacccgcttccatggtcttgcactataaactggaatggatttctcaatgcgggaccagattatgactagagtttttatgccagaaggaatcattggtgaactttccaaggttatttctgaatgtaacaatttccttaaaaatgacttatccaatttctgtatttcacctttagggttaaaaaaaactcttctactgaatctataaaaactgcagttttacatctgtgaactatggcttaagggacaggatttatgtagctaaactaattttgcaaatcaaacagacacttaaaaaaactagcatatgtaaaggtattcgttaatcctgtgaatggtagcttttgcacagaacttccaaaagcaaaacaaaaacaaaatctattgtagttatatacttcatttaacctaggtcacaagacccagggaatcttctaacctcacttttacagtaggtattactcttgtgacatttttttggttatcaacaactaaatataaattactttggaaaaagtaaggctgtcttgcaaaatgatcccagctctgattagcagccctctggagttcagaacttaagtatcagtgcaaatttctcaacctttctgggttagacaaagatccttttttgtgtgttcttttcaccacccctttggctcaccttgtatcagcaaacaaagtacttcttcagggaaacctgaaatttctaatgccttgaaaagcatattacaaaagtaatgctaccttttgggaaacaaactgccccgttaactccagatcattgcactggaatgtaatcaagaaagttagtcatgttttatgtaccatgttttcacacgtgtctcttctcttcgacttcctgaaagcgaaagctttacctcctgcaaatgtcagcacatgtagtaggacaccagtatcctaggacagagagccataagtagccctttggaggactgatggtgtcaaccaaaggcatgtgattgattaatgattcccccttagaaagcaagtgttaccaaagttgtgttatcttgaaagcattacaggtaagggcatgttatggttatttatcattgtttaatgaatagtagaggtgtcaagggactatgtatacatgattagggtaagatagaatgtattatatatatatatatatatacacacacacatatatatagctgaatctttggtgtattgaaataggcagcactctgaaagacagaagcttcgtccagccactcttcagcacattcctttactaagcagtttaaagccgtcctagtggagcaagccctaaagcagatttaatttttgccattttccaagaatgacggtggtggcttttagtcagaaaatggccttctgtgctttcaaaaaaaaaacaaaaaaaaaaccacacacacacataaaaaacccaacaggtcaaaataaaagttgaacttgagttacatttaatttaaatataaatgcattttgagaaatgttaagaacaatttagtcaatcgttcatctgtcattggtactgtaaaataagctgtggtctatttccactgtttaattttctactcagttctaccaaataggatgtcatgtttgacatttttgatagtgactttggggtcttcttcactgaaagcaccttagaactgtactataagaaaacatttcccctatgtataattatatgaatgtgatgtttattgcttattaatttataattcagtcattctctatataggacttcttaaaatttagaagggaaatctagctacttcaaattgtctgttaaatttattatgcccaaatcaacctctgaaaaaaggtttttccaggaagatttacatttaggtttaatatttttttagttaggtagagttttaaaaaatacttgagcctgtccgtgataaagctataaaattcaataactttttagaatgttaaatgaagacactgtttcctaacatcagtgagatacatctttgaatttaaacattcatatttactgagtacctactaggtaccaagtactcttttaggcactggaaatacagtgatggacaaaacaggtaaaaaatcgctgccccctcagagctgacattctggggtgggaatttcattttgccacgtactaacgttctgcacaaaagacaggctagactcttgtctagattgtttaaaagaaacttttcaaattggttacattaattttagtttattttcacaagtaaaaatggctttttatttagattctttctgtcccaggctgttgatcttaaaactagttgatttaaagagtttttttgcacaacatttcaattatatttgtgaacttagaaattaacttacaatctaaccagccatcatatcatatcctatcaggctagatatctcaatagtagactgaatacaaagctaattttttttacatgtcaatattggcacaaactggaatgaaagaatagtttgattcagacctgctccactatgtgttgctaaaacacatgctatgagcactcgaggaaacactatattttttccaaaaaatatgtgattatatatgttaaagtatagataacatttcacacttggatacatatgtgcatttactgtatttcttggtaagcatatttttgggggaaagtgctgctgatatgatacaagtagacaaaatttaaatgaaattttgtcacattctatggaaaatggtttctggtaaactgagaaggatattaaaataagtggcttttttctgggctaccattattgtttgatttctctttgtcaagtgtatagaacctgtcatacattcatgataagtagcactgaaaaattactcattcaaatttcccctgggcacgtaaggcaaaatattgccggttgggatttcaaggtcagtgacgacgcatttcctcccagtacagaccccccagccccccttgctggacatggggaggcagagagtcacttgaccatccagaaatacatgactacaagtcctttatgactgtttgccattttttttaatggtacttagtattttgatcaaactttagtctccagaactaaacaagtccctaagtttccttattttaatttactgtgactagatttgaagcaaataaatactccagatccatgcagctagaacacacttgcttccactactaaatatacagggtatgtcctaacatggagttaactggaatagcagtacactagcaagtatctgtgaatccttagcactgacgggttaacagaaatgctttggtaatacctacttagttaattggaggaagtagtaaataaacattaggtaatctgcagattacttcaaatgggaaaaatctttttgtagactctatagtaccctctctattcactagcttctgaaaagggaggagtatttttagtttgacaatttaataatttaaaaacaagacatctccaggtaggaaaaaatgaaagctatttcatgcaaacattatctaatttagcttaaaagtgaaagtggtaatactgttggtttctgtaaatgttgcagggttttaaactttataattactttaatatttttgataactagaaatctagtattgccataaaggaaactaagtgcccatcaaagatttgtttggtataaataaagaattatttgttttgttttcaatgacagtaagctacaaatcatgatgcttaaaaactttctaaagatgaattgtgtggcagtgattggtctgtttgtggagaatgtatgaaagctattaatattctagaatagattaataaattggctatgttgttccaatgaatgtacagcacttccattaacttttgaaagcaacacagccttaaactcaatgcttttgctttatgacatgggaatgttctgtcatcaatggagtgtattcttgtaatagaattctttatatcgttctcaattctatagactttcaagcctatgtatgaatatgaaggggtttttttttttttgctttgttttctttttagattttgtacattccatctttataggtctgtttcatatgttttatgtatagaacactaagtcttgcactctctgacattgatactgatatattctcgtcatttgttcttttatgaatcaaaatgttgactgcctatttaaagaaaagaatgaacgctgtgcatcaaagtgtttgtatgttcgtagctacatacgtaccacagtattttggatgctttagtctacaatgaaactttcaattaattctgtcttgaaacataggagaaacaggattcatgtgtatctctttaccatgcacaaaatctcaaatcattataataaagcttgttttctcc

SEQ ID NO: 96 - DNA, 960 bp, Homo sapiens
gaggcagtggcgacagcggcggcgagaggatgaacaacaagttcgacgctttgaaagatgatgacagtggggaccatgatcagaatgaagaaaacagcacacagaaagatggtgagaaggaaaaaacggaacgagacaagaatcagagcagtagcaagagaaaggctgttgtccctggaccggcagagcatcccctgcagtacaactacactttttggtactccaggagaacccccggccgtcccacgagctcacagagctatgaacagaatatcaaacagattggcacctttgcctctgtggagcagttctggaggttttatagccacatggtacgtcctggggacctgacaggccacagtgacttccatctcttcaaagaaggaattaaacccatgtgggaggatgatgcaaataaaaatggtggcaagtggattattcggctgcggaagggcttggcctcccgttgctgggagaatctcattttggccatgctgggggaacagttcatggttggggaggagatctgtggggctgtggtgtctgtccgctttcaggaagacattatttcaatatggaataagactgccagtgaccaagcaaccacagcccgaatccgggacacacttcggcgagtgcttaacctacctcccaacaccattatggaatacaaaactcacaccgacagcatcaaaatgccaggcaggctgggcccccaaaggctcctttttcaaaacctctggaagccgcggttgaatgtgccatgaccctctccctctctggatggcaccatcattgaagctggcgtcatcggagtctcttgttctgttggcgtgctacctggaagatccttctgtcctggacaagaggaatttggaagagcattttatgttttaagaacaggctgacacgcagcagctacaacaacagctgagatcacttaataaatggtgctaaact

SEQ ID NO: 97 - DNA, 2802 bp, Homo sapiens
agcggaggcggcggcggcggcggcggcggcagagggagtttccgctttgcactccaccccggtagcagctccgcggcagggacagcttcctccggacgcttggcgggcttcgctctcgccttacgacagcccggtcggatcatgggtttgcccagggggccggagggccagggtctcccggaggtggaaacaagagaagatgaagaacaaaatgtcaagttgactgaaattctggagctcttggttgcagctgggcatttcagggcaagaattaaaggcttatcaccctttgacaaggtagtaggaggaatgacttggtgtatcaccacttgcaactttgatgtagatgttgatttgctctttcaagaaaactctacgataggtcaaaaaatagctctgtcagaaaaaattgtctcggtcctgccaaggatgaaatgcccacaccagctggagccccaccagatccaggggatggattttattcacatatttcctgttgttcagtggctggtgaaacgagctatagaaacaaaagaagagatgggtgactatatccgctcctactctgtatcccagttccagaagacttacagtctccctgaggatgatgacttcataaagagaaaagaaaaggccatcaagacagttgtggacctctcagaagtgtacaagccccgtcggaaatacaaacgccaccagggagcagaggagctacttgatgaagaatctcgaatccatgctacacttttggaatatggcaggagatatggatttagctgccagagcaaaatggagaaggctgaggacaagaaaacggcacttccagcagggctgtcagctacagaaaaagctgatgcccacgaggaagatgagcttcgagcagctgaagagcagcgtattcagtcgctgatgaccaagatgaccgctatggcaaatgaggagagccgtctcaccgcaagctccgtgggccagattgtgggactctgctctgctgagatcaagcagattgtgtccgagtatgcagagaagcagtctgagctatcagctgaagaaagtccagaaaaattaggaacctcccagctacatcgccggaaagtcatttccttgaacaaacagattgcgcaaaagaccaaacatcttgaagagctgcgagcaagtcacaccagcctacaagccagatataatgaagccaagaaaacgctgacagagctgaagacttacagtgagaaactggacaaagagcaagcagccctcgagaagatagaatccaaagctgatccaagtatcctacagaacctgagagcacttgtagccatgaatgaaaatctgaaaagtcaagaacaggaatttaaagcacattgtcgagaggagatgacacgactacagcaagaaattgaaaacctgaaagctgagagagcaccacgtggagatgaaaagaccctctccagtggagagccgcctggtaccttgacctctgcaatgactcatgacgaagacctagacagacggtataatatggagaaagagaaactttacaagatacgtttactacaggctcgaagaaatcgagaaatagcaattttgcaccgcaagattgatgaagtccctagccgtgccgagctaatacagtatcagaagagatttattgaactctaccgccagatttcagcagtgcacaaagaaaccaagcagttcttcactttatataataccctggatgataaaaaggtttatttggaaaaagagattagtctgctgaactcaattcatgagaacttctcacaggccatggcctcccctgctgcccgggaccagtttttacgtcagatggaacagattgtggaaggaattaagcaaagtagaatgaagatggaaaagaaaaagcaagagaacaaaatgagaagagaccagttgaacgaccagtacttggagctgttagaaaagcagaggctatactttaagactgtgaaagagttcaaggaggagggccgcaagaacgagatgctgctgtccaaggtgaaagcgaaggcctcctgaacatccccagccgtggctgtatgtcattgattttacttttaagcaccgtatatcacctacaagatcatgaaatggttctgaaagcgacagtagagagatgcagttgtgatgatttcaacaacctggatgttttctttctcctctttgcttccattcatctctgttggctgctgttgatggagtcagacagtaaacacgtggcttggataacacccatcatcctatgaagaatatagggagtacttgttctctgttgattcaacttttatgtctccagtaacattgcgcttatgaaggtacctgtatttgtatggactctgaataaagaagaattcatttgtttagcaagtattagttcagcaaccactgagaaataagcactgaggaagattcagagacgtgtaaaacacagttcctactgcacaagtacccagcaggtggcccagggaggcagatacagcacacttgaccgcagaactgggctatccaagatgtttttcagtaaacagaaggcatttagctgaaatgatcagcccatgtagtgttggtcacttgggcctttcacctgccatggtaccttttgttcccagctcctccaggtgccagccagcaggcttggtggtgacagcaactggaacgaaagttcagtgttgttttaatttttatacgttactcaagttgatttctcagaaaattgaaaacagaccttgtgctgaggacacgtcaataaaaattataccttcccctacaaaaaaaaaaaaaaaa

SEQ ID NO: 98 - DNA, 2150 bp, Homo sapiens
ctcgagccacgaaggccccgctgtcctgtctagcagatacttgcacggtttacagaaattcggtccctgggtcgtgtcaggaaactggaaaaaaggtcataagcatgaagcgcagttcagtttccagcggtggtgctggccgcctctccatgcaggagttaagatcccaggatgtaaataaacaaggcctctatacccctcaaaccaaagagaaaccaacctttggaaagttgagtataaacaaaccgacatctgaaagaaaagtctcgctatttggcaaaagaactagtggacatggatcccggaatagtcaacttggtatattttccagttctgagaaaatcaaggacccgagaccacttaatgacaaagcattcattcagcagtgtattcgacaactctgtgagtttcttacagaaaatggttatgcacataatgtgtccatgaaatctctacaagctccctctgttaaagacttcctgaagatcttcacatttctttatggcttcctgtgcccctcatacgaacttcctgacacaaagtttgaagaagaggttccaagaatctttaaagaccttgggtatccttttgcactatccaaaagctccatgtacacagtgggggctcctcatacatggcctcacattgtggcagccttagtttggctaatagactgcatcaagatacatactgccatgaaagaaagctcacctttatttgatgatgggcagccttggggagaagaaactgaagatggaattatgcataataagttgtttttggactacaccataaaatgctatgagagttttatgagtggtgccgacagctttgatgagatgaatgcagagctgcagtcaaaactgaaggatttatttaatgtggatgcttttaagctggaatcattagaagcaaaaaacagagcattgaatgaacagattgcaagattggaacaagaaagagaaaaagaaccgaatcgtctagagtcgttgagaaaactgaaggcttccttacaaggagatgttcaaaagtatcaggcatacatgagcaatttggagtctcattcagccattcttgaccagaaattaaatggtctcaatgaggaaattgctagagtagaactagaatgtgaaacaataaaacaggagaacactcgactacagaatatcattgacaaccagaagtactcagttgcagacattgagcgaataaatcatgaaagaaatgaattgcagcagactattaataaattaaccaaggacctggaagctgaacaacagaagttgtggaatgaggagttaaaatatgccagaggcaaagaagcgattgaaacacaattagcagagtatcacaaattggctagaaaattaaaacttattcctaaaggtgctgagaattccaaaggttatgactttgaaattaagtttaatcccgaggctggtgccaactgccttgtcaaatacagggctcaagtttatgtacctcttaaggaactcctgaatgaaactgaagaagaaattaataaagccctaaataaaaaaatgggtttggaggatactttagaacaattgaatgcaatgataacagaaagcaagagaagtgtgagaactctgaaagaagaagttcaaaagctggatgatctttaccaacaaaaaattaaggaagcagaggaagaggatgaaaaatgtgccagtgagcttgagtccttggagaaacacaagcacctgctagaaagtactgttaaccaggggctcagtgaagctatgaatgaattagatgctgttcagcgggaataccaactagttgtgcaaaccacgactgaagaaagacgaaaagtgggaaataacttgcaacgtctgttagagatggttgctacacatgttgggtctgtagagaaacatcttgaggagcagattgctaaagttgatagagaatatgaagaatgcatgtcagaagatctctcggaaaatattaaagagattagagataagtatgagaagaaagctactctaattaagtcttctgaagaatgaagataaaatgttgatcatgtatatatatccatagtgaataaaattgtctcagtaaaaaaaaaaaaaaaaaaaaaaaaaaaaaaaaaaaaaaaaaaaaaaaaaaaaaaaaaaaaaaaa

SEQ ID NO: 99 - DNA, 469 bp, Homo sapiens
ttttttttttacctgaacacaccgtggctttattattaacggatgccaaaagcacacttcccagaaccgcgctagaggcgggcgcccagaggcagcaggacactacagctccttcctctggggcagaaaggagggtgcctgggaagttcgagggctgcagtggggaggcagaggtcccagcaacattgtcaatggcaggcagcggcaggaggggcgaggcgtgggcgagtccatgagtccagtgaggcggcgcgactcacttgaggcggtagagaaccttgcgctgcatgcgatgctggatctcgccgcgccgcagcatgagctgagcaccttgtggatggcgtgctccgggtttcaccagaatccaaccacctcctcctctcccctccccttgcgtgggacagaaaaaatacccccatccctgctcctgatgaagatgtccctagggaaggaatgatggctagaaaag

SEQ ID NO: 100 - DNA, 597 bp, Homo sapiens
tgtgtgtgttgtgtgtgtgtgtgtgtgcgtgtgtgtgtgtgtttaacagagaatatggccagtgcttgagttctttctccttctctctctctctttttttttaataactcttgctgggaaggtggtttataagccctgtgccaggtgtaagctggttgtgaaatacccaccactagagttttttaagtctccatattttctccattgtgccttcttatgtatttcaagtattattctgtgcactttaaatttacttaacttaccataagatgcagtgtgacttttcccacacagctggagttgtgaggctcttaacttcttaaaagtataggtggcatcgtgtgaatcctataaggcagtctttatgtctctaaacattcacacctacttttaaaaaccaaatattatgactatttctatcatgggtcgggccctttataactctctctcaaagatcacgacacctttaagaccccatggagttcacgtggtagggcaactccaacttcggagttcatctcttcaaatatgtcgtgtatagtccatatcacagggctgaaactggaccacactatggctgatggtatgcgaacacac

SEQ ID NO: 101 - DNA, 2740 bp, Homo sapiens
gcgaaattgaggtttcttggtattgcgcgtttctcttccttgctgactctccgaatggccatggactcgtcgcttcaggcccgcctgtttcccggtctcgctatcaagatccaacgcagtaatggtttaattcacagtgccaatgtaaggactgtgaacttggagaaatcctgtgtttcagtggaatgggcagaaggaggtgccacaaagggcaaagagattgattttgatgatgtggctgcaataaacccagaactcttacagcttcttcccttacatccgaaggacaatctgcccttgcaggaaaatgtaacaatccagaaacaaaaacggagatccgtcaactccaaaattcctgctccaaaagaaagtcttcgaagccgctccactcgcatgtccactgtctcagagcttcgcatcacggctcaggagaatgacatggaggtggagctgcctgcagctgcaaactcccgcaagcagttttcagttcctcctgcccccactaggccttcctgccctgcagtggctgaaataccattgaggatggtcagcgaggagatggaagagcaagtccattccatccgtggcagctcttctgcaaaccctgtgaactcagttcggaggaaatcatgtcttgtgaaggaagtggaaaaaatgaagaacaagcgagaagagaagaaggcccagaactctgaaatgagaatgaagagagctcaggagtatgacagtagttttccaaactgggaatttgcccgaatgattaaagaatttcgggctactttggaatgtcatccacttactatgactgatcctatcgaagagcacagaatatgtgtctgtgttaggaaacgcccactgaataagcaagaattggccaagaaagaaattgatgtgatttccattcctagcaagtgtctcctcttggtacatgaacccaagttgaaagtggacttaacaaagtatctggagaaccaagcattctgctttgactttgcatttgatgaaacagcttcgaatgaagttgtctacaggttcacagcaaggccactggtacagacaatctttgaaggtggaaaagcaacttgttttgcatatggccagacaggaagtggcaagacacatactatgggcggagacctctctgggaaagcccagaatgcatccaaagggatctatgccatggcctcccgggacgtcttcctcctgaagaatcaaccctgctaccggaagttgggcctggaagtctatgtgacattcttcgagatctacaatgggaagctgtttgacctgctcaacaagaaggccaagctgcgcgtgctggaggacggcaagcaacaggtgcaagtggtggggctgcaggagcatctggttaactctgctgatgatgtcatcaagatgctcgacatgggcagcgcctgcagaacctctgggcagacatttgccaactccaattcctcccgctcccacgcgtgcttccaaattattcttcgagctaaagggagaatgcatggcaagttctctttggtagatctggcagggaatgagcgaggcgcagacacttccagtgctgaccggcagacccgcatggagggcgcagaaatcaacaagagtctcttagccctgaaggagtgcatcagggccctgggacagaacaaggctcacaccccgttccgtgagagcaagctgacacaggtgctgagggactccttcattggggagaactctaggacttgcatgattgccacgatctcaccaggcataagctcctgtgaatatactttaaacaccctgagatatgcagacagggtcaaggagctgagcccccacagtgggcccagtggagagcagttgattcaaatggaaacagaagagatggaagcctgctctaacggggcgctgattccaggcaatttatccaaggaagaggaggaactgtcttcccagatgtccagctttaacgaagccatgactcagatcagggagctggaggagaaggctatggaagagctcaaggagatcatacagcaaggaccagactggcttgagctctctgagatgaccgagcagccagactatgacctggagacctttgtgaacaaagcggaatctgctctggcccagcaagccaagcatttctcagccctgcgagatgtcatcaaggccttacgcctggccatgcagctggaagagcaggctagcagacaaataagcagcaagaaacggccccagtgacgactgcaaataaaaatctgtttggtttgacacccagcctcttccctggccctccccagagaactttgggtacctggtgggtctaggcagggtctgagctgggacaggttctggtaaatgccaagtatgggggcatctgggcccagggcagctggggagggggtcagagtgacatgggacactccttttctgttcctcagttgtcgccctcacgagaggaaggagctcttagttacccttttgtgttgcccttctttccatcaaggggaatgttctcagcatagagctttctccgcagcatcctgcctgcgtggactggctgctaatggagagctccctggggttgtcctggctctggggagagagacggagcctttagtacagctatctgctggctctaaaccttctacgcctttgggccgagcactgaatgtcttgtactttaaaaaaatgtttctgagacctctttctactttactgtctccctagagtcctagaggatccctac

SEQ ID NO: 102 - DNA, 2457 bp, Homo sapiens
ggagcgcgtgaggctccggcgcgcaagcccggagcagcccgctggggcgcacagggtcgcgcgggcgcggggatggaggacggcgtggccggtccccagctcggggccgcggcggaggcggcggaggcggccgaggcgcgagcgcggcccggggtgacgctgcggcccttcgcgcccctctcgggggcggccgaggcggacgagggcggcggcgactggagcttcattgactgcgagatggaggaggtggacctgcaggacctgcccagcgccaccatcgcctgtcacctggacccgcgcgtgttcgtggacggcctgtgccgggccaaatttgagtccctctttaggacgtatgacaaggacatcacctttcagtattttaagagcttcaaacgagtcagaataaacttcagcaaccccttctccgcagcagatgccaggctccagctgcataagactgagtttctgggaaaggaaatgaagttatattttgctcagaccttacacataggaagctcacacctggctccgccaaatccagacaagcagtttctgatctcccctcccgcctctccgccagtgggatggaaacaagtggaagatgcgaccccagtcataaactatgatctcttatatgccatctccaagctggggccaggggaaaagtatgaattgcacgcagcgactgacaccactcccagcgtggtggtccatgtatgtgagagtgatcaagagaaggaggaagaagaggaaatggaaagaatgaggagacctaagccaaaaattatccagaccaggaggccggagtacacgccgatccacctcagctgaactggcacgcgacgaggacgcattccaaatcatactcacgggaggaatcttttactgtggaggtggctggtcacgacttcttcggaggtggcagccgagatcggggtggcagaaatcccagttcatgttgctcagaagagaatcaaggccgtgtccccttgttctaatgctgcacaccagttactgttcatggcacccgggaatgacttgggccaatcactgagtttgtggtgatcgcacaaggacatttgggactgtcttgagaaaacagataatgatagtgttttgtacttgttcttttctggtaggttctgtctgtgccaagggcaggttgatcagtgagctcaggagagagcttcctgtttctaagtggcctgcaggggccactctctactggtaggaagaggtaccacaggaagccgcctagtgcagagaggttgtgaaaacagcagcaatgcaatgtggaaattgtagcgtttcctttcttccctcatgttctcatgtttgtgcatgtatattactgatttacaagactaacctttgttcgtatataaagttacaccgttgttgttttacatcttttgggaagccaggaaagcgtttggaaaacgtatcacctttcccagattctcggattctcgactctttgcaacagcacttgcttgcggaactcttcctggaatgcattcactcagcatccccaaccgtgcaacgtgtaacttgtgcttttgcaaaagaagttgatctgaaattcctctgtagaatttagcttatacaattcagagaatagcagtttcactgccaacttttagtgggtgagaaattttagtttaggtgtttgggatcggacctcagtttctgttgtttcttttatgtggtggtttctatacatgaatcatagccaaaaacttttttggaaactgttggttgagatagttggttcttttaccccacgaagacatcaagatacacttgtaaataaagctgatagcatatattcatacctgttgtacacttgggtgaaaagtatggcagtgggagactaagatgtattaacctacctgtgaatcatatgttgtaggaaaagctgttcccatgtctaacaggacttgaattcaaagcatgtcaagtggatagtagatctgtggcgatatgagagggatgcagtgcctttccccattcattcctgatggaattgttatactaggttaacatttgtaatttttttctagttgtaatgtgtatgtctggtaaataggtattatattttggccttacaataccgtaacaatgtttgtcattttgaaatacttaatgccaagtaacaatgcatgctttggaaatttggaagatggttttattctttgagaagcaaatatgtttgcattaaatgctttgattgttcatatcaagaaattgattgaacgttctcaaaccctgtttacggtacttggtaagagggagccggtttgggagagaccattgcatcgctgtccaagtgtttcttgttaagtgcttttaaactggagaggctaacctcaaaatattttttttaactgcattctataataaatgggcacagtatgctccttacagaaaaaaaaaaaaaaaaaaaaaaaaaaaaaa

SEQ ID NO: 103 - DNA, 1633 bp, Homo sapiens
cgtggaggcagctagcgcgaggctggggagcgctgagccgcgcgtcgtgccctgcgctgcccagactagcgaacaatacagtcgggatggctaaaggtgaccccaagaaaccaaagggcaagacgtccgcttatgccttctttgtgcagacatgcagagaagaacataagaagaaaaacccagaggtccctgtcaattttgcggaattttccaagaagtgctctgagaggtggaagacggtgtccgggaaagagaaatccaaatttgatgaaatggcaaaggcagataaagtgcgctatgatcgggaaatgaaggattatggaccagctaagggaggcaagaagaagaaggatcctaatgctcccaaaaggccaccgtctggattcttcctgttctgttcagaattccgccccaagatcaaatccacaaaccccggcatctctattggagacgtggcaaaaaagctgggtgagatgtggaataatttaaatgacagtgaaaagcagccttacatcactaaggcggcaaagctgaaggagaagtatgagaaggatgttgctgactataagtcgaaaggaaagtttgatggtgcaaagggtcctgctaaagttgcccggaaaaaggtggaagaggaagatgaagaacaggaggaggaagaagaggaggaggaggaggaggaggatgaataaagaaactgtttatctgtctccttgtgaatacttagagtaggggagcgccgtaattgacacatctcttatttgagaagtgtctgttgccctcattaggtttaattacaaaatttgatcacgatcatattgtagtctctcaaagtgctctagaaattgtcagtggtttacatgaagtggccatgggtgtctggagcaccctgaaactgtatcaaagttgtacatatttccaaacatttttaaaatgaaaaggcactctcgtgttctcctcactctgtgcactttgctgttggtgtgacaaggcatttaaagatgtttctggcattttctttttatttgtaaggtggtggtaactatggttattggctagaaatcctgagttttcaactgtatatatctatagtttgtaaaaagaacaaaacaaccgagacaaacccttgatgctccttgctcggcgttgaggctgtggggaagatgccttttgggagaggctgtagctcagggcgtgcactgtgaggctggacctgttgactctgcagggggcatccatttagcttcaggttgtcttgtttctgtatatagtgacatagcattctgctgccatcttagctgtggacaaaggggggtcagctggcatgagaatatttttttttaagtgcggtagtttttaaactgtttgtttttaaacaaactatagaactcttcattgtcagcaaagcaaagagtcactgcatcaatgaaagttcaagaacctcctgtacttaaacacgattcgcaacgttctgttattttttttgtatgtttagaatgctgaaatgtttttgaagttaaataaacagtattacatttttagaactcttctctactataacagtcaatttctgactcacagcagtgaacaaacccccactccgttgtatttggagactggcctccctataaatgtg

SEQ ID NO: 104 - DNA, 1679 bp, Homo sapiens
ccggaagccgccgcggacaagctctcccgggcgcgggcgggggtcgtgtgcttggaggaagccgcggaacccccagcgtccgtccatggcgtggagccttgggagctggctgggtggctgcctgctggtgtcagcattgggaatggtaccacctcccgaaaatgtcagaatgaattctgttaatttcaagaacattctacagtgggagtcacctgcttttgccaaagggaacctgactttcacagctcagtacctaagttataggatattccaagataaatgcatgaatactaccttgacggaatgtgatttctcaagtctttccaagtatggtgaccacaccttgagagtcagggctgaatttgcagatgagcattcagactgggtaaacatcaccttctgtcctgtggatgacaccattattggaccccctggaatgcaagtagaagtacttgctgattctttacatatgcgtttcttagcccctaaaattgagaatgaatacgaaacttggactatgaagaatgtgtataactcatggacttataatgtgcaatactggaaaaacggtactgatgaaaagtttcaaattactccccagtatgactttgaggtcctcagaaacctggagccatggacaacttattgtgttcaagttcgagggtttcttcctgatcggaacaaagctggggaatggagtgagcctgtctgtgagcaaacaacccatgacgaaacggtcccctcctggatggtggccgtcatcctcatggcctcggtcttcatggtctgcctggcactcctcggctgcttcgccttgctgtggtgcgtttacaagaagacaaagtacgccttctcccctaggaattctcttccacagcacctgaaagagtttttgggccatcctcatcataacacacttctgtttttctcctttccattgtcggatgagaatgatgtttttgacaagctaagtgtcattgcagaagactctgagagcggcaagcagaatcctggtgacagctgcagcctcgggaccccgcctgggcaggggccccaaagctaggctctgagaaggaaacacactcggctgggcacagtgacgtactccatctcacatctgcctcagtgagggatcagggcagcaaacaagggccaagaccatctgagccagccccacatctagaactcccagaccctggacttagccaccagagagctacattttaaaggctgtcttggcaaaaatactccatttgggaactcactgccttataaaggctttcatgatgttttcagaagttggccactgagagtgtaattttcagccttttatatcactaaaataagatcatgttttaattgtgagaaacagggccgagcacagtggctcacgcctgtaataccagcaccttagaggtcgaggcaggcggatcacttgaggtcaggagttcaagaccagcctggccaatatggtgaaacccagtctctactaaaaatacaaaaattagctaggcatgatggcgcatgcctataatcccagctactcgagtgcctgaggcaggagaattgcatgaacccgggaggaggaggaggaggttgcagtgagccgagatagcggcactgcactccagcctgggtgacaaagtgagactccatctcaaaaaaaaaaaaaaaaaaaa

SEQ ID NO: 105 - DNA, 2857 bp, Homo sapiens
ttttgaaaatcttgttgattctggggagccgagcgcgcggcgcgagcgtcacgccagacagcggcccgcgcgccttctcctcggcgtcggccgccgccgcctcccagaacctcctcgtgccctcgcgtgccaggcccgcggcggccgaaatccgcggttcacagcatgtccgcctcggcccctgctgcggagggggagggaacccccacccagcccgcgtccgagaaagaacccgaaatgcccggtcccagagaggagagcgaggaggaagaggacgaggacgacgaggaggaggaggaggaggaaaaagaaaagagtctcatcgtggaaggcaagagggaaaagaaaaaagtagagaggttgacaatgcaagtctcttccttacagagagagccatttacaattgcacaaggaaaggggcagaaactttgtgaaattgagaggatacatttttttctaagtaagaagaaaaccgatgaacttagaaatctacacaaactgctttacaacaggccaggcactgtgtcctcattaaagaagaatgtgggtcagttcagtggctttccatttgaaaaaggaagtgtccaatataaaaagaaggaagaaatgttgaaaaaatttagaaatgccatgttaaagagcatctgtgaggttcttgatttggagagatcaggtgtaaatagtgaactagtgaagaggatcttgaatttcttaatgcatccaaagccttctggcaaaccattgccgaaatctaaaaaaacttgtagcaaaggcagtaaaaaggaacggaacagttctggaatggcaaggaaggctaagcgaaccaaatgtcctgaaattctgtcagatgaatctagtagtgatgaagatgaaaagaaaaacaaggaagagtcttcagatgatgaagataaagaaagtgaagaggagccaccaaaaaagacagccaaaagagaaaaacctaaacagaaagctacttctaaaagtaaaaaatctgtgaaaagtgccaatgttaagaaagcagatagcagcaccaccaagaagaatcaaaacagttccaaaaaagaaagtgagtctgaggatagttcagatgatgaacctttaattaaaaagttgaagaaaccccctacagatgaagagttaaaggaaacaataaagaaattactggccagtgctaacttggaagaagtcacaatgaaacagatttgcaaaaaggtctatgaaaattatcctacttatgatttaactgaaagaaaagatttcataaaaacaactgtaaaagagctaatttcttgagatagaggacagagaagatgactcgttcccatagatttgaagatctgatttataccattataccagcaaagagaatgtatttccttttctaaatccttgttaagcaacgttagtagaacttactgctgacctttttatcttgagtgttatgtgaatttgagtttgctgttttaaattgcatttctatgccatttttagtttaaaatcttgcatggcattaattgttccttgcttttatagttgtattttgtacattttggatttctttatataaggtcatagattcttgagctgttgtggtttttagtgcacttaatattagcttgcttaaggcatacttttaatcaagtagaacaaaaactattatcaccaggatttatacatacagagattgtagtatttagtatatgaaatattttgaatacacatctctgtcagtgtgaaaattcagcggcagtgtgtccatcatattaaaaatatacaagctacagttgtccagatcactgaattggaacttttctcctgcatgtgtatatatgtcaaattgtcagcatgacaaaagtgacagatgttatttttgtatttttaaaaaacaattggttgtatataaagtttttttatttcttttgtgcagatcactttttaaactcacataggtaggtatctttatagttgtagactatggaatgtcagtgttcagccaaacagtatgatggaacagtgaaagtcaattcagtgatggcaacactgaaggaacagttaccctgctttgcctcgaaagtgtcatcaatttgtaattttagtattaactctgtaaaagtgtctgtaggtacgttttatattatataaggacagaccaaaaatcaacctatcaaagcttcaaaaactttgggaaagggtgggattaagtacaagcacatttggcttacagtaaatgaactgatttttattaactgcttttgcccatataaaatgctgatatttactggaaacctagccagcttcacgattatgactaaagtaccagattataatgccagaatataatgtgcaggcaatcgtggatgtctctgacaaagtgtgtctcaaaaataatatacttttacattaaagaaatttaatgtttctctggagttggggctcttggctttcagagtttggttaatcagtgttgattctagatgatcaacataatggaccactcctgaatgagacttaattttgtctttcaaatttactgtcttaaatcagtttattaaatctgaattttaaaacatgctgtttatgacacaatgacacatttgttgcaccaattaagtgttgaaaaatatctttgcatcatagaacagaaatatataaaaatatatgttgaatgttaacaggtattttcacaggtttgtttcttgatagttactcagacactagggaaaggtaaatacaagtgaacaaaataagcaactaaatgagacctaataattggccttcgattttaaatatttgttcttataaaccttgtcaataaaaataaatctaaatcaaaaaaaaaaaaaaaaaaaaaaaaaaa

SEQ ID NO: 106 - DNA, 543 bp, Homo sapiens
  modified_base (443)..(524): n = a, c, g or t/u
ttgaaagcacagaaggccattttctgactaaaagccaccaccgtcattcttggaaaatggcaaaaattaaatctgctttagggcttgctccactaggacggctttaaactgcttagtaaaggaatgtgctgaagagtggctggacgaagcttctgtctttcagagtgctgcctatttcaatacaccaaagattcagctatatatatgtgtgtgtgtatatatatatatatataatacattctatcttaccctaatcatgtatacatagtcccttgacacctctactattcattaaacaatgataaataaccataacatgcccttacctgtaatgctttcaagataacacaactttgggtaacacttggcttttctaagggggaatcattaatcaatcacatgcctttggttggacaccatcagtcctccaaaggggctacttntggctccctgtccctaggatactggtgtcctactacatgtggctgacanttgcnggagggtaangctttcggctttcaggnagtcgaagagctcgtgccg

SEQ ID NO: 107 - DNA, 2728 bp, Homo sapiens
atcttggcttcccggggaaaggcggcgtgaggggaagaagttgtagggtgggggcaggagtgaggaggagggaagagagagggggaggaggccgcggcggggcagggcggggactgcctgcctgcctgggttgcggaagtgatagccgccgaccgagcctgctgctttcttgctactgcttcggcttcccggctaccccccggacggtgaaggcggcccagctgtggatggtcagatagcccttgtctcccgccgccaatctctggcccctagcagcacggagcagacggcggcagcagcagcagcaggcgaggaggaagatggcgggacggctgccggcctgtgtggtggactgtggcacggggtatacaaaactaggatatgctggaaatacagaaccacagtttatcatcccttcctgtattgctattaaggagtcagcaaaagtgggtgatcaagctcaaaggagggtgatgaaaggtgttgatgacctagacttcttcattggtgatgaagcaatagaaaaacctacatatgcaacaaagtggccaatccgccatggtatagttgaagattgggacttaatggaaaggtttatggagcaagtgatctttaaatatttaagggcagaacctgaagaccattattttcttttgactgaacctccattgaatactccagaaaacagggaatatactgctgaaataatgtttgagtccttcaatgttccaggcttgtacattgctgtgcaggctgttcttgccttagctgcatcttggacctcaagacaagtaggagaacggacgttgaccggtacggtaatagacagtggagatggtgtcactcatgtcattcctgtggctgaagggtatgtgattggcagctgtattaaacacattccaatcgcaggacgagatataacatattttattcagcaactgctgagagaccgagaagtaggaatccctccagaacaatccttggaaactgctaaggcagtaaaggagcgctatagttatgtctgcccagatttagtaaaagaatttaacaagtatgatacagatgggtcaaaatggattaaacagtatactggaatcaatgctatctcaaagaaagagttttctatcgatgttggttatgagagatttttgggacctgaaatcttttttcatccagagtttgctaatccagactttacacaacctatctcagaagttgtagatgaagtaattcagaattgtcctattgatgtcagacgtcctctctacaagaatattgtcctctctggaggttcaaccatgttcagggactttggacgtcgcttgcaaagagatttgaaaagaactgtagatgcccggctgaaattaagtgaggaattgagtggtggtagattgaagccaaaacctattgatgtacaagtcattacacaccacatgcagcgatatgcagtttggtttggaggatcaatgctggcttccacgcctgagttctaccaagtatgccacaccaaaaaggattatgaagaaattggacctagcatttgtcgtcacaatccagtgtttggagtcatgtcgtaaaattggcttcatagttattggggttagggaggtggggaagagataatctttctgattacctgttttgtctggatggctggttttgaggttttaaacctgacttgaaatagtaacaccaaacatgattatacaggaatattttaataagtgtatcaccatgcagatgtagaagagagcgaaagtgattgtgtttttctttagattgaatatttgaatcttatgtgtaacaaaaagaagtgggttttagttctttctgtgccctgatattttgtatattaatgaattatccaagattcgatgggatttatcagtgtgtagatagctctataatgcttgaattgtacacttctaagtgtgcagtgcaagagcttgtttatatttcatactttttatactttgaggaaaaaaagtcaaagaaaaattgtatttgagggaaaaaaccatgaccaagtaaaggataaattcaaaaaatagcctcatgagacttggcatacacactcgtgggattccagttattatggagtgcttccatccctctccaccccttccccccaaaaggttttctttgcaagtgcttttggaactaagagctagtatcttggattaactgatgcctgctagtgctttctgattactcgcattctgtttcttgctttaaaagaagagtaaagacaagagtgttggaccagtattgcagttctgtagtgtcatttcttataaaaaacaaaacaacaacaataatttatcaaaattggcatatttaaagcctaacattctaataaaggcacaaatttctttttaatacttgtttcagcctctttaatctctttataagttaactaataaatctattttcttcagacttctgcaatagttctttaaaatcacaacagttagcaagctgacttttgtaatgtgctcaatacaaatacttgtgaacttttaatatgttgagtgctttcattttgataactggatctccatttgatattttcatttgtataactcatttgcagtctgaaaattttttttagtgccagtccctgaacatatcattgaaagttaattttctttgcattttaaaatatctggattatgaagaaaaagtgatgaaaataaattaaaactgaattacaaaaaaaaaaaaaaaa

SEQ ID NO: 108 - DNA, 886 bp, Homo sapiens
tttccgcgagcgccggcactgcccgctccgagcccgtgtctgtcgggtgccgagccaactttcctgcgtccatgcagccccgccggcaacggctgcctgctccctggtccgggcccaggggcccgcgccccaccgccccgctgctcgcgctgctgctgttgctcgccccggtggcggcgcccgcggggtccggggaccccgacgaccctgggcagcctcaggatgctggggtcccgcgcaggctcctgcagcaggcggcgcgcgcggcgcttcacttcttcaacttccggtccggctcgcccagcgcgctacgagtgctggccgaggtgcaggagggccgcgcgtggattaatccaaaagagggatgtaaagttcacgtggtcttcagcacagagcgctacaacccagagtctttacttcaggaaggtgagggacgtttggggaaatgttctgctcgagtgtttttcaagaatcagaaacccagaccaaccatcaatgtaacttgtacacggctcatcgagaaaaagaaaagacaacaagaggattacctgctttacaagcaaatgaagcaactgaaaaaccccttggaaatagtcagcatacctgataatcatggacatattgatccctctctgagactcatctgggatttggctttccttggaagctcttacgtgatgtgggaaatgacaacacaggtgtcacactactacttggcacagctcactagtgtgaggcagtgggtaagaaaaacctgaaaattaacttgtgccacaagagttacaatcaaagtggtctccttagactgaattcatgtgaacttctaatttcatatcaagagttgtaatcacatttatttcaataaatatgtgagttcctgcaaaaa

SEQ ID NO: 109 - DNA, 886 bp, Homo sapiens; identical to SEQ ID NO: 108

SEQ ID NO: 110 - DNA, 4092 bp, Homo sapiens
gtcacaaaggggggaacacgtgggcgccggctgccggggcggcgatcttagggaactagggtcacctggagagccgcccaccgtctctgcccgctcgactcctccgcccgggccgctcggccggtccagccgcggccggcgcctggctgtgaggtggattcccggcccagtctgaccatctccctccagtttttccacttcgttcggaccttctcataactatgtccaccctctacgtctcccctcacccagatgccttccccagcctccgagccctcatagccgctcgctatggggaggctggggagggtcccggatggggaggagcccacccccgcatctgtctccagccacccccgactagcaggactccctttcccccaccccgcctgccggccctggagcaggggcccggtgggctctgggtgtggggggccacggctgtggcccagctgctgtggccagcaggcctggggggcccagggggcagccgggcggctgtccttgtccaacagtgggtcagttacgccgacacggagttaataccagctgcctgtggagcaacgctgccggccctgggactccgaagctcggcccaggacccccaggctgtgctgggggccctgggcagggccctgagccccttggaggagtggcttcggctgcacacctacttggccggggaggcccccactctggctgacctggcggctgtcacagccttgctgctgcctttccgatacgtcctagacccacctgcccgccggatctggaataatgtgactcgctggtttgtcacgtgtgtccggcagccagaattccgagccgtgctaggagaagtggttctatactcaggagccaggcctctctctcatcagccaggccccgaggctcctgccctcccaaagacagctgctcagctcaagaaagaggcaaagaaacgggagaagctagagaaattccaacagaagcagaagatccaacagcagcagccacctccaggggagaagaaaccaaaaccagagaagagggagaaacgggatcctggggtcattacctatgacctcccaaccccacccggggaaaagaaagatgtcagtggccccatgcccgactcctacagccctcggtatgtggaggctgcctggtacccttggtgggagcagcagggcttcttcaagccagagtatgggcgtcctaatgtgtcagcagcaaatccccgaggtgtcttcatgatgtgcatcccaccccccaatgtgacaggctccctgcacctgggccatgcactcaccaacgccatccaggactccctgactcgatggcaccgcatgcgtggggagaccaccctgtggaaccctggctgtgaccatgcaggtattgccacccaggtggtggtggagaagaagctatggcgtgagcagggactgagccggcaccagctgggccgcgaggcctttctacaggaagtctggaagtggaaggaggagaaaggtgaccggatttaccaccagttgaagaagcttggcagctccttggactgggatcgagcctgtttcaccatggaccctaaactctcagcagctgtgacagaggcctttgtccggcttcacgaggaaggcatcatctatcgcagtacccgccttgttaactggtcctgcaccctcaactccgccatctctgacattgaggtggataagaaggagctgacaggtcgcaccctgctctccgtgcctggctacaaggagaaggtggagttcggggtcctcgtgtcctttgcctataaggtccaaggctcagatagcgacgaggaggtggtggtggcaacaactcggatcgagacaatgctgggagatgtggctgtagctgtgcaccccaaagataccagataccagcacctgaaggggaagaacgtgatccacccattcctgtctcggagccttcccattgtcttcgatgaatttgtggacatggactttggcacaggtgctgtgaagatcacccccgcacatgaccaaaatgactatgaagttgggcagcggcacgggctggaggccatcagcatcatggactcccggggggccctcatcaatgtgcctccgcctttcctgggcctgcccaggtttgaggccaggaaagcggtgctggtggcgctgaaggagcggggactgttccgtggcattgaggacaaccccatggtggtgccactttgcaaccggtcgaaggacgtggtagagcctctgctgcggccgcagtggtacgttcgctgcggggagatggcccaggctgccagcgccgctgtgactcggggtgacctccgcatcctgcctgaggcccatcagcgcacatggcatgcctggatggacaacatccgggagtggtgcatttccaggcagctgtggtggggccatcgcatcccagcctactttgtcactgtcagtgacccagcggtgccccctggggaggaccctgatgggcggtactgggtgagtggacgcaatgaggcggaggcccgggagaaggcagccaaggagttcggagtgtcccctgacaagatcagtctccagcaagatgaggatgtattggatacctggttctcctctggcctcttccccttatccattttgggctggcccaaccagtcagaagacctgagtgtgttctaccccgggacactgctggagaccggtcatgacatcctcttcttctgggtggcccggatggtcatgctgggcctgaagctcacgggcaggctgccctttagagaggtctacctccatgccatcgtgcgagatgctcacggccggaagatgagcaagtctctaggcaatgtcatcgatcccctggatgtcatctatggaatctccctgcagggcctccacaaccagctgctgaacagcaacctggatcccagcgaggtggagaaggccaaagaagggcagaaagctgacttcccagcggggattcctgaatgtggcaccgatgctctccggtttggattatgtgcctacatgtcccagggtcgtgacatcaacctggatgtgaaccggatactgggttaccgccacttctgcaacaagctctggaatgccaccaagtttgcccttcgtggccttgggaagggttttgtgccctcacccacctcccagcccggaggccatgagagcctggtggaccgctggatccgcagccgcctgacagaggctgtgaggctcagcaatcaaggcttccaggcctacgacttcccggccgtcaccactgcccagtacagcttctggctctatgagctctgtgatgtctacttggagtgcctgaaacctgtactgaatggggtggaccaggtggcagctgagtgtgcccgccagaccctgtacacttgcctggacgttggcctgcggctgctctcacccttcatgcccttcgtgacggaggagctgttccagaggctgccccggaggatgccgcaagctccccctagcctctgtgttaccccctacccggagccctcagagtgctcctggaaggaccccgaggcagaagccgcccttgagctggcgctaagcatcacgcgagccgtgcgctccctgcgggccgactacaacctcacccggatccggcctgactgtttcctggaagtggcggatgaggccacgggcgccctggcatcggcggtgtcgggctacgtgcaggccctggccagcgcaggtgtggtggctgttctggccctgggggctcccgccccccagggttgcgctgtggctctggcttctgatcgctgctccatccacctgcagcttcaggggctggtggaccctgcacgggagctgggcaagctgcaagccaagcgagttgaggcccagcggcaggcccagcgtctgcgggaacgccgtgctgcctcgggctatcctgtcaaggtgccgctcgaagtccaggaggcagatgaagccaagctccaacagacagaagcagagctcaggaaggtggatgaggccatcgccctattccagaagatgctgtgatccaccacccagcttcacccctcacccccagcggctcaccatggggatggcagcaataaaatattttcccacaaaa

SEQ ID NO: 111 - DNA, 1395 bp, Homo sapiens
agaagctgcagcggaggaaggcgagctcgagagtcaggatgtctcagatttaacaacagttgaaagggaagactcatcattacttaatcctgcagccaaaaaactgaaaatagataccaaagaaaagaaagagaaaaagcagaaagtagatgaagatgagattcagaagatgcaaatcctggtttcttctttttctgaggagcagctgaaccgttatgaaatgtatcgccgctcagctttccctaaggcagccatcaaaaggctgatccagtccatcactggcacctctgtgtctcagaatgttgttattgctatgtctggtatttccaaggttttcgtcggggaggtggtagaagaagcactggatgtgtgtgagaagtggggagaaatgccaccactacaacccaaacatatgagggaagccgttagaaggttaaagtcaaaaggacagatccctaactcgaagcacaaaaaaaatcatcttcttctagaccaaagtctagaaaggcctatgttactgacggaagaagtattggttccagacttcctataagactgtctgcattggtgctttagtatctcaggcctccaaggattccatgatgattttaatgtctttctcaaaactctgatatttgtcacacctagaaagtatgtagcctgattgatacttgccttgactaaattttgggacctcttggggcattttgaagtatttaactgtcttgaccagttggaagaagatacgtgggccataagcatcttctggacaggggaactgctttcagagagaaaacctttccaagagagttttgttttgttttggtttcgttttgtttgagatagggtcttgctctatcacctaggctggagtgcagcggcatgactgcagccttgaactcctgggcttaagtgaccctcccacctcagtctcctgagtagctaggactacaggcacacactactgtgcccagctaacttatttttattttttatggagatggggtcttgctttgttgcccaggctggtcgtgaactcctggcttcaagcagtcctcctgcctcagcctcctaaagtgccgagggctttaatggtttcacattgaagcctgaagttgctaagacttaggttgtttcttatatctggttttaagtagatgaaacaaccagaaacttttacttgtgatactctaccatgaaggatgcggtaatggcaggaatagcagaataattggtgcttgtaaacatttaagattctcctgtggattttggtgagtgatcattaaactgttttccaacttgaaaaaaaaaaaaaaaaaaaaaaaaaaaaaaaaaaaaaaaaaaaaaaaaaaaaaaaaaaaaaaaaaaaaaaaaaaaaaaaaaaaaaaaaaaaaa

SEQ ID NO: 112 - DNA, 1225 bp, Homo sapiens
cgcatctggagaaccagcggttaccatggaggggatcagtatatacacttcagataactacaccgaggaaatgggctcaggggactatgactccatgaaggaaccctgtttccgtgaagaaaatgctaatttcaataaaatcttcctgcccaccatctactccatcatcttcttaactggcattgtgggcaatggattggtcatcctggtcatgggttaccagaagaaactgagaagcatgacggacaagtacaggctgcacctgtcagtggccgacctcctctttgtcatcacgcttcccttctgggcagttgatgccgtggcaaactggtactttgggaacttcctatgcaaggcagtccatgtcatctacacagtcaacctctacagcagtgtcctcatcctggccttcatcagtctggaccgctacctggccatcgtccacgccaccaacagtcagaggccaaggaagctgttggctgaaaaggtggtctatgttggcgtctggatccctgccctcctgctgactattcccgacttcatctttgccaacgtcagtgaggcagatgacagatatatctgtgaccgcttctaccccaatgacttgtgggtggttgtgttccagtttcagcacatcatggttggccttatcctgcctggtattgtcatcctgtcctgctattgcattatcatctccaagctgtcacactccaagggccaccagaagcgcaaggccctcaagaccacagtcatcctcatcctggctttcttcgcctgttggctgccttactacattgggatcagcatcgactccttcatcctcctggaaatcatcaagcaagggtgtgagtttgagaacactgtgcacaagtggatttccatcaccgaggccctagctttcttccactgttgtctgaaccccatcctctatgctttccttggagccaaatttaaaacctctgcccagcacgcactcacctctgtgagcagagggtccagcctcaagatcctctccaaaggaaagcgaggtggacattcatctgtttccactgagtctgagtcttcaagttttcactccagctaacacagatgtaaaagactttttttttatacgataaataacttttttttaagttacacatttttcagatataaaagactgaccaatattgtacagtttttattgcttgttggatttttgtcttgtgtttctttagtttttgtg

SEQ ID NO: 113 - DNA, 1668 bp, Homo sapiens
ctcctcctcgcccgccgctaggtccatcccggcccagccaccatgtccatccacttcagctccccggtattcacctcgcgctcagccgccttctcgggccgcggcgcccaggtgcgcctgagctccgctcgccccggcggccttggcagcagcagcctctacggcctcggcgcctcgcggccgcgcgtggccgtgcgctctgcctatgggggcccggtgggcgccggcatccgcgaggtcaccattaaccagagcctgctggccccgctgcggctggacgccgacccctccctccagcgggtgcgccaggaggagagcgagcagatcaagaccctcaacaacaagtttgcctccttcatcgacaaggtgcggtttctggagcagcagaacaagctgctggagaccaagtggacgctgctgcaggagcagaagtcggccaagagcagccgcctcccagacatctttgaggcccagattgctggccttcggggtcagcttgaggcactgcaggtggatgggggccgcctggaggcggagctgcggagcatgcaggatgtggtggaggacttcaagaataagtacgaagatgaaattaaccgccgcacagctgctgagaatgagtttgtggtgctgaagaaggatgtggatgctgcctacatgagcaaggtggagctggaggccaaggtggatgccctgaatgatgagatcaacttcctcaggaccctcaatgagacggagttgacagagctgcagtcccagatctccgacacatctgtggtgctgtccatggacaacagtcgctccctggacctggacggcatcatcgctgaggtcaaggcacagtatgaggagatggccaaatgcagccgggctgaggctgaagcctggtaccagaccaagtttgagaccctccaggcccaggctgggaagcatggggacgacctccggaatacccggaatgagatttcagagatgaaccgggccatccagaggctgcaggctgagatcgacaacatcaagaaccagcgtgccaagttggaggccgccattgccgaggctgaggagcgtggggagctggcgctcaaggatgctcgtgccaagcaggaggagctggaagccgccctgcagcgggccaagcaggatatggcacggcagctgcgtgagtaccaggaactcatgagcgtgaagctggccctggacatcgagatcgccacctaccgcaagctgctggagggcgaggagagccggttggctggagatggagtgggagccgtgaatatctctgtgatgaattccactggtggcagtagcagtggcggtggcattgggctgaccctcgggggaaccatgggcagcaatgccctgagcttctccagcagtgcgggtcctgggctcctgaaggcttattccatccggaccgcatccgccagtcgcaggagtgcccgcgactgagccgcctcccaccactccactcctccagccaccacccacaatcacaagaagattcccacccctgcctcccatgcctggtcccaagacagtgagacagtctggaaagtgatgtcagaatagcttccaataaagcagcctcattctgaggcctgagtgatccacgtgaaaaaaaaaaaaaaaaaaaaaaaaaaaaaaaaaaaaaaaaaaaaaaaaaaa

SEQ ID NO: 114 - DNA, 508 bp, Homo sapiens
aacatttcgaatgctttaatcaacagacatatacaaatgaattttaaaataaaaccaaggcatcaatgaagaagatctaacatgaaagtcaccacatctcacaatgagaatccgatcagatggaagaaggcaaaagtctaaatcatagagtggcggagggaggcacgggagagacggagggctctgggactaaatcatcagggcatggccacctgatgtcttccactttcagggtcccagggccctaggtggaggtttgggacaaatatggtatttggtcacaaggagcaacagtacgatctgctgtatctggaatgggaaaggcgcacagaatcctggaaggactgaagacatcagatgctatgataacaagatggagagtacgagggcacaagagctgtaaggaggctctgtgctcttcggtgacaggcatcaatcacaccacagcaagatgtcattaaaaagttactactttagtggaagatctggagtagctacaggaaaaact

SEQ ID NO: 115 - DNA, 1215 bp, Homo sapiens
cgtcagttggtcacgtggttgttcggagcgggcgagcggagttagcagggctttactgcagagcgcgccgggcactccagcgaccgtggggatcagcgtaggtgagctgtggccttttgcgaggtgctgcagccatagctacgtgcgttcgctacgaggattgagcgtctccacccagtaagtgggcaagaggcggcaggaagtgggtacgcaggggcgcaaggcgcacagcctctagacgactcgctttccctccggccaacctctgaagccgcgtcctactttgacagctgcagggccgcggcctggtcttctgtgcttcaccatctacataatgaatcccagtatgaagcagaaacaagaagaaatcaaagagaatataaagaatagttctgtcccaagaagaactctgaagatgattcagccttctgcatctggatctcttgttggaagagaaaatgagctgtccgcaggcttgtccaaaaggaaacatcggaatgaccacttaacatctacaacttccagccctggggttattgtcccagaatctagtgaaaataaaaatcttggaggagtcacccaggagtcatttgatcttatgattaaagaaaatccatcctctcagtattggaaggaagtggcagaaaaacggagaaaggcgctgtatgaagcacttaaggaaaatgagaaacttcataaagaaattgaacaaaaggacaatgaaattgcccgcctgaaaaaggagaataaagaactggcagaagtagcagaacatgtacagtatatggcagagctaatagagagactgaatggtgaacctctggataattttgaatcactggataatcaggaatttgattctgaagaagaaactgttgaggattctctagtggaagactcagaaattggcacgtgtgctgaaggaactgtatcttcctctacggatgcaaagccatgtatatgaaatgcattaatatttgactgttgagaattttactgccgaagtttacctccactagttctttgtagcagagtacataactacataatgccaactctggaatcaaatttccttgtttgaatcctgggaccctattgcattaaagtacaaatactatgtatttttaatctatgatggtttatgtgaataggattttctcagttgtcagccatgacttatgtttattactaaataaacttcaaactcctgttgaa

SEQ ID NO: 116 - DNA, 717 bp, Homo sapiens
agagcgatcatgtcgcacaaacaaatttactattcggacaaatacgacgacgaggagtttgagtatcgacatgtcatgctgcccaaggacatagccaagctggtccctaaaacccatctgatgtctgaatctgaatggaggaatcttggcgttcagcagagtcagggatgggtccattatatgatccatgaaccagaacctcacatcttgctgttccggcgcccactacccaagaaaccaaagaaatgaagctggcaagctacttttcagcctcaagctttacacagctgtccttacttcctaacatctttctgataacattattatgttgccttcttgtttctcactttgatatttaaaagatgttcaatacactgtttgaatgtgctggtaactgctttgcttcttgagtagagccaccaccaccatagcccagccagatgagtgctctgtggacccacagcctaagctgagtgtgaccccagaagccacgatgtgctctgtatccagaacacacttggcagatggaggaagcatctgagtttgagaccatggctgttacagggatcatgtaaacttgctgtttttgttttttctgccgggtgttgtatgtgtggtgacttgcggatttatgtttcagtgtactggaaactttccattttattcaagaaatctgttcatgttaaaagccttgattaaagaggaagtttttataat

SEQ ID NO: 117 - DNA, 3332 bp, Homo sapiens
ggtttgccgctgccggccagcgtcctctggccatggacaccccggaaaatgtccttcagatgcttgaagcccacatgcagagctacaagggcaatgaccctcttggtgaatgggaaagatacatacagtgggtagaagagaattttcctgagaataaagaatacttgataactttactagaacatttaatgaaggaatttttagataagaagaaataccacaatgacccaagattcatcagttattgtttaaaatttgctgagtacaacagtgacctccatcaattttttgagtttctgtacaaccatgggattggaaccctgtcatcccctctgtacattgcctgggcggggcatctggaagcccaaggagagctgcagcatgccagtgctgtccttcagagaggaattcaaaaccaggctgaacccagagagttcctgcaacaacaatacaggttatttcagacacgcctcactgaaacccatttgccagctcaagctagaacctcagaacctctgcataatgttcaggttttaaatcaaatgataacatcaaaatcaaatccaggaaataacatggcctgcatttctaagaatcagggttcagagctttctggagtgatatcttcagcttgtgataaagagtcaaatatggaacgaagagtgatcacgatttctaaatcagaatattctgtgcactcatctttggcatccaaagttgatgttgagcaggttgttatgtattgcaaggagaagcttattcgtggggaatcagaattttcctttgaagaattgagagcccagaaatacaatcaacggagaaagcatgagcaatgggtaaatgaagacagacattatatgaaaaggaaagaagcaaatgcttttgaagaacagctattaaaacagaaaatggatgaacttcataagaagttgcatcaggtggtggagacatcccatgaggatctgcccgcttcccaggaaaggtccgaggttaatccagcacgtatggggccaagtgtaggctcccagcaggaactgagagcgccatgtcttccagtaacctatcagcagacaccagtgaacatggaaaagaacccaagagaggcacctcctgttgttcctcctttggcaaatgctatttctgcagctttggtgtccccagccaccagccagagcattgctcctcctgttcctttgaaagcccagacagtaacagactccatgtttgcagtggccagcaaagatgctggatgtgtgaataagagtactcatgaattcaagccacagagtggagcagagatcaaagaagggtgtgaaacacataaggttgccaacacaagttcttttcacacaactccaaacacatcactgggaatggttcaggcaacgccatccaaagtgcagccatcacccaccgtgcacacaaaagaagcattaggtttcatcatgaatatgtttcaggctcctacacttcctgatatttctgatgacaaagatgaatggcaatctctagatcaaaatgaagatgcatttgaagcccagtttcaaaaaaatgtaaggtcatctggggcttggggagtcaataagatcatctcttctttgtcatctgcttttcatgtgtttgaagatggaaacaaagaaaattatggattaccacagcctaaaaataaacccacaggagccaggacctttggagaacgctctgtcagcagacttccttcaaaaccaaaggaggaagtgcctcatgctgaagagtttttggatgactcaactgtatggggtattcgctgcaacaaaaccctggcacccagtcctaagagcccaggagacttcacatctgctgcacaacttgcgtctacaccattccacaagcttccagtggagtcagtgcacattttagaagataaagaaaatgtggtagcaaaacagtgtacccaggcgactttggattcttgtgaggaaaacatggtggtgccttcaagggatggaaaattcagtccaattcaagagaaaagcccaaaacaggccttgtcgtctcacatgtattcagcatccttacttcgtctgagccagcctgctgcaggtggggtacttacctgtgaggcagagttgggcgttgaggcttgcagactcacagacactgacgctgccattgcagaagatccaccagatgctattgctgggctccaagcagaatggatgcagatgagttcacttgggactgttgatgctccaaacttcattgttgggaacccatgggatgataagctgattttcaaacttttatctgggctttctaaaccagtgagttcctatccaaatacttttgaatggcaatgtaaacttccagccatcaagcccaagactgaatttcaattgggttctaagctggtctatgtccatcaccttcttggagaaggagcctttgcccaggtgtacgaagctacccagggagatctgaatgatgctaaaaataaacagaaatttgttttaaaggtccaaaagcctgccaacccctgggaattctacattgggacccagttgatggaaagactaaagccatctatgcagcacatgtttatgaagttctattctgcccacttattccagaatggcagtgtattagtaggagagctctacagctatggaacattattaaatgccattaacctctataaaaatacccctgaaaaagtgatgcctcaaggtcttgtcatctcttttgctatgagaatgctttacatgattgagcaagtgcatgactgtgaaatcattcatggagacattaaaccagacaatttcatacttggaaacggatttttggaacaggatgatgaagatgatttatctgctggcttggcactgattgacctgggtcagagtatagatatgaaactttttccaaaaggaactatattcacagcaaagtgtgaaacatctggttttcagtgtgttgagatgctcagcaacaaaccatggaactaccagatcgattactttggggttgctgcaacagtatattgcatgctctttggcacttacatgaaagtgaaaaatgaaggaggagagtgtaagcctgaaggtctttttagaaggcttcctcatttggatatgtggaatgaattttttcatgttatgttgaatattccagattgtcatcatcttccatctttggatttgttaaggcaaaagctgaagaaagtatttcaacaacactatactaacaagattagggccctacgtaataggctaattgtactgctcttagaatgtaagcgttcacgaaaataaaatttggatatagacagtccttaaaaaaaaaaaaaaaaaaaa

SEQ ID NO: 118 - DNA, 3769 bp, Homo sapiens
aaagctgcagcgtctggaaaaaagcgacttgtggcggtcgagcgtggcgcaggcgaatcctcggcactaagcaaatatggacctcgcggcggcagcggagccgggcgccggcagccagcacctggaggtccgcgacgaggtggccgagaagtgccagaaactgttcctggacttcttggaggagtttcagagcagcgatggagaaattaaatacttgcaattagcagaggaactgattcgtcctgagagaaacacattggttgtgagttttgtggacctggaacaatttaaccagcaactttccaccaccattcaagaggagttctatagagtttacccttacctgtgtcgggccttgaaaacattcgtcaaagaccgtaaagagatccctcttgccaaggatttttatgttgcattccaagacctgcctaccagacacaagattcgagagctcacctcatccagaattggtttgctcactcgcatcagtgggcaggtggtgcggactcacccagttcacccagagcttgtgagcggaacttttctgtgcttggactgtcagacagtgatcagggatgtagaacagcagttcaaatacacacagccaaacatctgccgaaatccagtttgtgccaacaggaggagattcttactggatacaaataaatcaagatttgttgattttcaaaaggttcgtattcaagagacccaagctgagcttcctcgagggagtatcccccgcagtttagaagtaattttaagggctgaagctgtggaatcagctcaagctggtgacaagtgtgactttacagggacactgattgttgtgcctgacgtctccaagcttagcacaccaggagcacgtgcagaaactaattcccgtgtcagtggtgttgatggatatgagacagaaggcattcgaggactccgggcccttggtgttagggacctttcttataggctggtctttcttgcctgctgtgttgcgccaaccaacccaaggtttggggggaaagagctcagagatgaggaacagacagctgagagcattaagaaccaaatgactgtgaaagaatgggagaaagtgtttgagatgagtcaagataaaaatctataccacaatctttgtaccagcctgttccctactatacatggcaatgatgaagtaaaacggggtgtcctgctgatgctctttggtggcgttccaaagacaacaggagaagggacctctcttcgaggggacataaatgtttgcattgttggtgacccaagtacagctaagagccaatttctcaagcacgtggaggagttcagccccagagctgtctacaccagtggtaaagcgtccagtgctgctggcttaacagcagctgttgtgagagatgaagaatctcatgagtttgtcattgaggctggagctttgatgttggctgataatggtgtgtgttgtattgatgaatttgataagatggacgtgcgggatcaagttgctattcatgaagctatggaacagcagaccatatccatcactaaagcaggagtgaaggctactctgaacgcccggacgtccattttggcagcagcaaacccaatcagtggacactatgacagatcaaaatcattgaaacagaatataaatttgtcagctcccatcatgtcccgattcgatctcttctttatccttgtggatgaatgtaatgaggttacagattatgccattgccaggcgcatagtagatttgcattcaagaattgaggaatcaattgatcgtgtctattccctcgatgatatcagaagatatcttctctttgcaagacagtttaaacccaagatttccaaagagtcagaggacttcattgtggagcaatataaacatctccgccagagagatggttctggagtgaccaagtcttcatggaggattacagtgcgacagcttgagagcatgattcgtctctctgaagctatggctcggatgcactgctgtgatgaggtccaacctaaacatgtgaaggaagctttccggttactgaataaatcaatcatccgtgtggaaacacctgatgtcaatctagatcaagaggaagagatccagatggaggtagatgagggtgctggtggcatcaatggtcatgctgacagccctgctcctgtgaacgggatcaatggctacaatgaagacataaatcaagagtctgctcccaaagcctccttaaggctgggcttctctgagtactgccgaatctctaaccttattgtgcttcacctcagaaaggtggaagaagaagaggacgagtcagcattaaagaggagcgagcttgttaactggtacttgaaggaaatcgaatcagagatagactctgaagaagaacttataaataaaaaaagaatcatagagaaagttattcatcgactcacacactatgatcatgttctaattgagctcacccaggctggattgaaaggctccacagagggaagtgagagctatgaagaagatccctacttggtagttaaccctaactacttgctcgaagattgagatagtgaaagtaactgaccagagctgaggaactgtggcacagcacctcgtggcctggagcctggctggagctctgctagggacagaagtgtttctggaagtgatgcttccaggatttgttttcagaaacaagaattgagttgatggtcctatgtgtcacattcatcacaggtttcataccaacacaggcttcagcacttcctttggtgtgtttcctgtcccagtgaagttggaaccaaataatgtgtagtctctataaccaatacctttgttttcatgtgtaagaaaaggcccattacttttaaggtatgtgctgtcctattgagcaaataactttttttcaattgccagctactgcttttattcatcaaaataaaataacttgttctgaagttgtctattggatttctttctactgtaccctgattattacttccatctacttctgaatgtgagactttccctttttgcttaacctggagtgaagaggtagaactgtggtattatggatgaggtttctatgagaaggagtcattagagaactcatatgaaagctagaggccttagagatgactttccaaggttaattccagttgtttttttttttttttaagtttataaaagtttattatacttttttaaaattactctttagtaatttattttacttctgtgtcctaagggtaatttctcaggattgttttcaaattgcttttttaggggaaataggtcatttgctatattacaagcaatccccaaattttatggtcttccaggaaaagttattaccgtttatgatactaacagttcctgagacttagctatgatcagtatgttcatgaggtggagcagttcctgtgttgcagcttttaacaacagatggcattcattaaatcacaaagtatgttaaaggtcacaaaagcaaaataactgtctgaggctaaggcccacgtgggacagtctaatacccatgagtactcaacttgccttgatgtctgagctttccagtgcaatgtgaatttgagcagccagaaatctattagtagaaagcaagacagattaatataggttaaaacaatgatttaaatatgtttctcccaataattatctctttccctggaatcaacttgtatgaaaccttgtcaaaatgtactccacaagtatgtacaattaagtattttaaaaataaatggcaaacattaaaaacaaaaaaaaaaaaaaaaaaaa

SEQ ID NO: 119 - DNA, 1686 bp, Homo sapiens
ccacgcgtccgggcgtaagccaggcgtgttaaagccggtcggaactgctccggagggcacgggctccgtaggcaccaactgcaaggacccctccccctgcgggcgctcccatggcacagttcgcgttcgagagtgacctgcactcgctgcttcagctggatgcacccatccccaatgcaccccctgcgcgctggcagcgcaaagccaaggaagccgcaggcccggccccctcacccatgcgggccgccaaccgatcccacagcgccggcaggactccgggccgaactcctggcaaatccagttccaaggttcagaccactcctagcaaacctggcggtgaccgctatatcccccatcgcagtgctgcccagatggaggtggccagcttcctcctgagcaaggagaaccagtctgaaaacagccagacgcccaccaagaaggaacatcagaaagcctgggctttgaacctgaacggttttgatgtagaggaagccaagatccttcggctcagtggaaaaccacaaaatgcgccagagggttatcagaacagactgaaagtactctacagccaaaaggccactcctggctccagccggaagacctgccgttacattccttccctgccagaccgtatcctggatgcgcctgaaatccgaaatgactattacctgaaccttgtggattggagttctgggaatgtactggccgtggcactggacaacagtgtgtacctgtggagtgcaagctctggtgacatcctgcagcttttgcaaatggagcagcctggggaatatatatcctctgtggcctggatcaaagagggcaactacttggctgtgggcaccagcagtgctgaggtgcagctatgggatgtgcagcagcagaaacggcttcgaaatatgaccagtcactctgcccgagtgggctccctaagctggaacagctatatcctgtccagtggttcacgttctggccacatccaccaccatgatgttcgggtagcagaacaccatgtggccacactgagtggccacagccaggaagtgtgtgggctgcgctgggccccagatggacgacatttggccagtggtggtaatgataacttggtcaatgtgtggcctagtgctcctggagagggtggctgggttcctctgcagacattcacccagcatcaaggggctgtcaaggccgtagcatggtgtccctggcagtccaatgtcctggcaacaggagggggcaccagtgatcgacacattcgcatctggaatgtgtgctctggggcctgtctgagtgccgtggatgcccattcccaggtgtgctccatcctctggtctccccattacaaggagctcatctcaggccatggctttgcacagaaccagctagttatttggaagtacccaaccatggccaaggtggctgaactcaaaggtcacacatcccgggtcctgagtctgaccatgagcccagatggggccacagtggcatccgcagcagcagatgagaccctgaggctatggcgctgttttgagttggaccctgcgcggcggcgggagcgggagaaggccagtgcagccaaaagcagcctcatccaccaaggcatccgctgaagaccaacccatcacctcagttgttttttatttttctaataaagtcatgtctcccttcatgtttttttttttaaaa

SEQ ID NO: 120 - DNA, 4646 bp, Homo sapiens
gggaggcggtggccgaggcccaggcggtggcggcggcggcccaggaggcggcggacggggagctgcgggagcaggcccgggcctggctctctagcggccgcctggctgcagcatgcgcgcccgccgggggctgctgcggctgccgcgccgctcgctgctcgccgcgctcttcttcttttctctctcgtcctcgctgctgtacttcgtctatgtggcgcccggcatagtgaacacctacctcttcatgatgcaagcccaaggcattctgatccgggacaacgtgagaacaatcggtgctcaggtttatgagcaggtgcttcggagtgcttatgccaagaggaacagcagtgtaaatgactcagattatcctcttgacttgaaccacagtgaaaccttcctgcaaactacaacatttcttcctgaagacttcacctactttgcaaaccatacctgccctgaaagactcccttccatgaagggcccaatagacataaacatgagtgaaattggaatggattacattcatgaactcttctccaaagacccaaccatcaagctcggaggtcactggaagccttctgattgcatgcctcggtggaaggtggcgatccttatccccttccggaaccgccacgagcacctcccagtcctgttcagacacctgcttcccatgctccagcgccagcgcttgcagtttgcattttatgtggttgaacaagttggtacccaaccctttaatcgagccatgcttttcaacgttggctttcaagaggcaatgaaagacttggattgggactgtttgatttttcatgatgtagatcacataccggaaagtgatcgcaactattatggatgtggacagatgccgaggcattttgcaaccaaattggataagtatatgtatctgcttccttataccgagttctttggcggagtgagtggcttaacagtggaacaatttcggaaaatcaatggctttcctaatgctttctggggttggggtggagaagatgacgacctctggaacagagtacagaatgcaggctattctgtgagccggccagagggtgacacaggaaagtacaagtccattcctcatcaccatcgaggagaagtccagtttcttggaaggtatgctctgctgaggaagtcaaaagaacggcaagggctggatggcctcaacaacctgaactactttgcaaacatcacatacgacgccttgtataaaaacataactgtcaacctgacacccgagctggctcaggtgaacgagtactgagaggagagaatgtacgtttgctttacccaccgccaccaagaaagcagtccgatgagatttttttttggaggggggagggtctacacagcaagagaacagaaatactgtgtctcatgaaggatcacagagttcagggggaaaatgtgacagcacacgcacaaacgccttcactggatcagccgctggaactgagggagtgagcttggggacttccttcgtcagcactggctttctgttttcacaagacagacgtctgtcccgctgctctctccccatctcctaccccacatcctgtcttagccgcagtctccagaacccatgatgaactgtgatctgccgtggtcctgccgtggtcctgccgtggagcctgtccctacacatgaccttggagcctcttggccttcagagcagaggcaaacccaccacagggcagctgcgttttaggaagagcaaatgaaactccacaccattcttctagatctctggtgttctctttggtttcatttttttaaaaaattaccttctttgggtggggattgagggtggaggggagggtgtttgggaaagataaatagacataaatatataacaatcacttcttgaagaagtataattgtaaataagccatgtaaaatgcctttttaaaatttaattttctagctggctccaattcaaattgaggatttatgtattaggccacttacttggttggcaagtgcaggaactcagttaaaatgcagttgaagaatgtcatctcccgaattgctgtcactttggcgagggagtggatatagggcatgtcacaaaagaacaaaataacccgacctttattgctgggagctggcttctgtccctttcttcccccccccacgagtcttgcccttgacttctgctctggattcactcttccctgtcggccgcgcatgtgctcatcccactctccgctaagcgggaggctgctgttagagcaggctgcttcctgcctaaagcaggcccttcggggctcgctgcacacacatctctggctctccaggcttcgtgttctgtcttttcatcagcatggcggggcggggggcggggggcgggggtgtgtatgggaatccctccccctcttactttttctcttgtggaacttggccacagtttctgaacaatgtgcctacattaccagctggcttcagtgattcctctgtgtccctttttggtttctggaaagattctttgtcaacattagtaactgatacatagaaccaaggagcactcaaatagggagccaggagccagggagctggtgacacttgtgtgctgtggggcagctgggatccaggtaagaccggattgaagctttgaaattagactaacaaagctccagacagcaagagcccaggtgcactgctcacacccccacctgcattttgaagtcatattattttttgttttgttttttaagacggtctggctctgtcgcctaagctggagtgtggtggcacgatcacagctcactgcagcctccatctcctaggctcaagccattttcccacctcagcctcccgagtagctgggactacaggtgcacaccaccacacctggctaattttttgtatttttagtagagacaggggtttcttccatgttgcccaggctggtctcgaactcctggactcaagcaatccgcccaccttgacttcccaaagtgctgggattatgggcgggtgtgagccattgcgcccagccttgaagtcatgttctaaattgtatttgaatttgtgcctctttgtttttccccaaaccaaagccctcaaattgtagtctctgtcggcttctgcagaattctggaaaatgccagttttcctcccccgcccttgttttccataaaacatatttatatattgtgatgaggagtactttctgaagagtacttcgtatttttttttaattgccttgtttgccttcaacttccttgattttcatagtttacatgggtgtgtgtaggggtgtgtgtgtgtatgtgtgtgggttagggcttttttcgttgcatgtgatggttctgtggacatatgatccccacaaactgtgggagtgattggccaggccttgttttgtttgtttgtttgtttgtgtttttgttcttttgaagaatagagtggtatttagaaaataaattgcattgcaaagctcttatcggctcatatgagagagcaggttcctgcccttgaaaatgccggtaagctatagcatatgttttttaagacttaagcatttcatgctttaaaataccttcacaagtgaacattacacacagaagttcatttggttttcctttgttttatggtgcatatagcaataaagacccccctccaccctgcaacccccatcccccaccgggcctttgtccctgccttggcttttctccccttctcattctcctctcccctttcctcactgaaggctgtgagttgctttcaatgtgacaacactatgatgtcatttggaaggatttgccaggacagactgattctgagtcctgggtgccgtatgtgtatgcggcagtgttgtcaggcgatcttgtttgaagctctatgttgccataattaccatcaagtacacactgttggcaaaaggctaacacctgactttagaaaatgctgatttgagaacaaaaggaaaggtcttttttcactgcttaaagtggggtcactttgatacctttgcggtcatgtctgtgtctgatgagtgtagaatctctggatgtgcactgtcagtcatgtgtccaccaggcctcgaatatcatatgggaaatgtcatagttaaaaacgtacagccaggcccgtgtgctgttaatagtgtgaaattgtcatgttaaaaaaaaaaacaggaaccaaatgtgaccttgtgcatatattggtagctgaaaatcttcaaggctactgatgggtggccccttaatcttgtctttgattgctgtgtgcagggaaaggtgtccccgtttgttcatgctgttttggggggtgggggggtatttgcaagaatactcattttgacataataggtcctcttgtcagagatcctctaccacagacattaatagctgagcaggagccacatggattgattgtatccactcaccattgacgatggcattgagcgtagctagcttatttccatcactacgtgtttttgagcttgctcttacgttttaagaggtgccaggggtacatttttgcactgaaatctaaagatgttttaaaaaacacttttcacaaaaatagtcctttgtcattacattatttactcatgtgtttgtacatttttgtatgttaatttatgaatgattttttcagtaaaaaatacatattcaagaaccaaa

SEQ ID NO: 121 - DNA, 1102 bp, Homo sapiens
gcgtcgacgtcttgccaccgcatctggagaaccagcggttaccatggaggggatcagtatatacacttcagataactacaccgaggaaatgggctcaggggactatgactccatgaaggaaccctgtttccgtgaagaaaatgctaatttcaataaaatcttcctgcccaccatctactccatcatcttcttaactggcattgtgggcaatggattggtcatcctggtcatgggttaccagaagaaactgagaagcatgacggacaagtacaggctgcacctgtcagtggccgacctcctctttgtcatcacgcttcccttctgggcagttgatgccgtggcaaactggtactttgggaacttcctatgcaaggcagtccatgtcatctacacagtcaacctctacagcagtgtcctcatcctggccttcatcagtctggaccgctacctggccattgtccacgccaccaacagtcagaggccaaggaagctgttggctgaaaaggtggtctatgttggcgtctggatccctgccctcctgctgactattcccgacttcatctttgccaacgtcagtgaggcagatgacagatatatctgtgaccgcttctaccccaatgacttgtgggtggttgtgttccagtttcagcacatcatggttggccttatcctgcctggtattgtcatcctgtcctgctattgcattatcatctccaagctgtcacactccaagggccaccagaagcgcaaggccctcaagaccacaatcatccccatcctggctttcttcgcctgttggctgccttactacattgggatcagcatcgactccttcatcctcctggaaatcatcaagcaagggtgtgagtttgagaacactgtgcacaagtggatttccatcaccgaggccctagctttcttccactgttgtctgaaccccatcctctatgctttccttggagccaaatttaaaacctctgcccagcacgcactcacctctgtgagcagagggtccagcctcaagatcctctccaaaggaaagcgaggtggacattcatctgtttccactgagtctgagtcttcaagttttcactccagctaa

SEQ ID NO: 122 - DNA, 1292 bp, Homo sapiens
atccagcttgggctccagttttctgcccgcctccttttacgttattgcggagcgacggcgccggacagtcaacgtcatctaggagcaccgagcagcttggctaaaagtaagggtgtcgtgctgatggccctgtgcgcactgacccgcgctctgcgctctctgaacctggcgcccccgaccgtcgccgcccctgccccgagtctgttccccgccgcccagatgatgaacaatggcctcctccaacagccctctgccttgatgttgctcccctgccgcccagttcttacttctgtggcccttaatgccaactttgtgtcctggaagagtcgtaccaagtacaccattacaccagtgaagatgaggaagtctgggggccgagaccacacaggccgaatccgggtgcatggtattggcgggggccacaagcaacgttatcgaatgattgactttctgcgtttccggcctgaggagaccaagtcaggaccctttgaggagaaggttatccaagtccgctatgatccctgtaggtcagcagacatagctctggttgctgggggcagccggaaacgctggatcatcgccacagaaaacatgcaggctggagatacaatcttgaactctaaccacataggccgaatggcagttgctgctcgggaaggggatgcgcatcctcttggggctctgcctgtggggaccctcatcaacaacgtggaaagtgagccaggccggggtgcccaatatatccgagctgcagggacgtgtggtgtgctactgcggaaggtgaatggcacagccattatccagctgccctctaagaggcagatgcaggtgctggaaacgtgcgtagcaacagtaggccgagtatccaacgttgatcataacaaacgggtcattggcaaggcaggtcgcaaccgctggctgggcaagaggcctaacagtgggcggtggcaccgcaaggggggctgggctggccgaaagattcggccactaccccccatgaagagttacgtgaagctgccttctgcttctgcccaaagctgatatccctgtactctaataaaatgccccccccccccgttttaatctgttactgtggttttgttttgggtgttttttgttttttttgttgttgttttttttttgcgggggaggggatggtacagactaaacgtggggaaaagaagtaaaaagtgtggaagagaaagtacaggacactgggtctgtccccaccccaattcccttacaagtaatggagccggggatggaaataaatgacgtccaaggtcaaaaaa

SEQ ID NO: 123 - DNA, 2737 bp, Homo sapiens
ctttctacaaacaacccttcgctgacgtgattggttatgtgtatgttgcaaaactaattcctttttctacatctgattctttctacttttgtttagagttaatgctccttttatgtcacaagttgctttgctttttaaattatttcaaattggcactttgggggctgcctaagaattgataagcggggtatgatctgttgatgaatcttccagatttgtgactccctgcatcctctgatggccatttttcatatttggggttttggagggaagaaagctaactcgctttcaaaatgtgtcatttgcgatcttatctgggaacggtttgaggctcgggggaactctgctctcttgctcttggctgccatcactgctgccatgccctgttgcctgcctgcctcaggtgggaaggaggtttccccacctgggagcaggtggcagtcccaggtggttaggagccagtgagcagcagcaccttgcattgccaaaatcagagctgtggggcagcatttttccatacttggttcattcaaacaatgtggggtcgtttgcctctccctcaggcagaagagtccagagcagagggggttgtctccagtgggtgtctataattgttcctctgtggtcttgcatgtcagaaattgctatttagtggtcagcttctgatgtcctgtctcctagcacagggaagcccccagctttgagatcaggatagtcaaagtgtcttgatacgggccacttgggcttctccccctgacccccccaaaagaaacctgcatcttctctggagaaggtgtttttcttattcttttttttttctttttttcttttttcttttttttaaggatttcttttatcaaagcagtattgctgaagagttggaaacagttctcattgtctcctccttaaaaaaagggctggctttacatgagaagtaagggtggaatggaagaggagaggaacctgtggaaggtgggcgatgagctcaggtctgtagagcctctcagggcctatgaccttgagatgttcatccccttagaagatagaactgggtttcctgggcccccagatgcatttgcagtgagacttgtgaaatgctggacttacaggtggtgtttgatttgatttctgcacattctctctggagtagaaatggagactggaaaggtcgagtctggttttgctgggcagctgggtggccagcaaagccagctgcacgtccccaagcacagatagagtggcaagggcatgtccagcttactgaccatctgcattgagctcattctcattttctatatctgacttaaagtttctctcgtttcttttcttctcttcacctttaagcacaaacataaaccatccttgctacagcctagaacagttaagtaaacctttctcactgcccctaactgtgtgtgccatgaagtcgcagtgttgtagtggctctgggcttcagcggtgtttgccacggccatccctgtgatagtgccacctcagtccccacagaccagtcatctccattgcttttctttgcccgtgatgcttgttggagtagatgaatatagtgtgtcttagcgctgtcctttccggctgtagctcccaccagttaattccgaactgggggtgggctgaccttgatgtgaaagaatgttggagcagcatcctgccaaaaagcaactcacgttggctctcctgccagtgtgccctgagtggccccaaggcacctggctggagggaaaatggcaaacttttggctgaactggagaatgtcctaacaaacccccttccagaatggctttagtctctagtgcttgctagcatgggagctttgtcttgaattccttttgatctgccccgtttctctccagccttaggaataaatctagaggctattgtgcaatgatctgtgggctttttagaagtctctaaatttccttgaaattcagtacagcccagcataaactactcaagttcttgatcagcctgctgctttgttcttattaataaaagcagtgtgtagctggctaaggacttgttttattaatgctccacaggagcagagacagacagagagacatagtgagccttgaaccaaacacctgtattccaacattttacacagcggtctgggcaccctgtgcctaggagagccagctacgtgtctacctgagtctgacctgggccaggggctgttatcttgggaaagccagaatgtcattaagaaagggacaaataggcagttgcttgtgtagcaaggcagccaccaggttgctcaaagggggttctgcataaaccaacatattttgttgttgcttccagggcagcagaagaagcctttgtaaatgacattgacgagtcgtccccaggcactgagtgggaacgggtggcccggctgtgtgactttaaccccaagtctagcaagcaggccaaagatgtctcccgcatgcgctcagtcctcatctccctcaagcaggccccgctggtgcactgaagagcaccctgtggaaacactacatctgcaatatcttaatcctactcagtgaagctcttcacagtcattggattaattatgttgagttcttttggaccaaacctttttgtctttagagttgttcattgtttgtgattgcatgtttccttccttcaactgtgttctccctggcattcagagaggagggagaggaggaagaggaaggggagggaagcttgcatgcctgcaggtcgactctagaggatc

SEQ ID NO: 124 - DNA, 2461 bp, Homo sapiens
atgctgggtacgctgcgcgccatggagggcgaggacgtggaagacgaccagctgctgcagaagctcagggccagtcgccgccgcttccagaggcgcatgcagcggctgatagagaagtacaaccagcccttcgaggacaccccggtggtgcaaatggccacgctgacctacgagacgccacagggattgagaatttggggtggaagactaataaaggaaagaaacaaaggagagatccaggactcctccatgaagcccgcggacaggacagatggctccgtgcaagctgcagcctggggtcctgagcttccctcgcaccgcacagtcctgggagccgattcaaaaagcggtgaggtcgatgccacgtcagaccaggaagagtcagttgcttgggccttagcacctgcagtgcctcaaagccctttgaaaaatgaattaagaaggaaatacttgacccaagtggatatactgctacaaggtgcagagtattttgagtgtgcaggtaacagagctggaagggatgtacgtgtgactccgctgccttcactggcctcacctgccgtgcctgcccccggatactgcagtcgtatctccggaaagagtcctggtgacccagcgaaaccagcttcatctcccagagaatgggatcctttgcatccttcctccacagacatggccttagtacctagaaatgacagcctctccctacaagagaccagtagcagcagcttcttaagcagccagccctttgaagatgatgacatttgcaatgtgaccatcagtgacctgtacgcagggatgctgcactccatgagccggctgttgagcacaaagccatcaagcatcatctccaccaaaacgttcatcatgcaaaactggaactgcaggaggaggcacagatataagagcaggatgaacaaaacatattgcaaaggagccagacgttctcagaggagctccaaggagaacttcataccctgctctgagcctgtgaaagggacaggggcattaagagattgcaagaacgtattagatgtttcttgccgtaagacaggtttaaaattggaaaaagcttttcttgaagtcaacagaccccaaatccataagttagatccaagttggaaggagcgcaaagtgacaccctcgaagtattcttccttgatttacttcgactccagtgcaacatataatcttgatgaggaaaatagatttaggacattaaaatggttaatttctcctgtaaaaatagtttccagaccaacaatacgacagggccatggagagaaccgtcagagggagattgaaatccgatttgatcagcttcatcgggaatattgcctgagtcccaggaaccagcctcgccggatgtgcctcccggactcctgggccatgaacatgtacagagggggtcctgcgagtcctggtggccttcagggcttagaaacccgcaggctgagtttaccttccagcaaagcaaaagcaaaaagtttaagtgaggcttttgaaaacctaggcaaaagatctctggaagcaggtaggtgcctgcccaagagcgattcatcttcatcacttccaaagaccaaccccacacacagcgcaactcgcccgcagcagacatctgaccttcacgttcagggaaatagttctggaatatttagaaagtcagtgtcacccagcaaaactctttcagtcccagataaagaagtgccaggccacggaaggaatcgttacgatgaaattaaagaagaatttgacaagcttcatcaaaagtattgcctcaaatctcctgggcagatgacagtgcctttatgtattggagtgtctacagataaagcaagtatggaagttcgatatcaaacagaaggcttcttaggaaaattaaatccagaccctcacttccagggtttccagaagttgccatcatcacccctggggtgcagaaaaagtctactgggctcaactgcaattgaggctccttcatctacatgtgttgctcgtgccatcacgagggatggcacgagggaccatcagttccctgcaaaaagacccaggctatcagaaccccagggctccggacgccagggcaattccctgggtgcctcagatggggtggacaacaccgtcagaccgggagaccagggcagctcttcacagcccaactcagaagagagaggagagaacacgtcttacaggatggaagagaaaagtgatttcatgctagaaaaattggaaactaaaagtgtgtagctaggttatttcggagtgttatttatcttcccacttgctctctgtttgtatttttgttttgtttttgattcttgagactgtgaggacttggttgacttctctgcccttaaagtaaatattagtgaaattggttccatcagagataacctcgagttcttggtgtagaaattatgtgaataaagttgctcaattagaaaaaaaaaaaaaaaaaaaa

SEQ ID NO: 125 - DNA, 696 bp, Homo sapiens
gaacagttatttctccagtcctggaagggaggcagggacctatgggcccatgaagaaagtgctggttgacaaccctaagaaccggatgctgcttattgagaaccttcgggagtcccagccctaccgctacacggtgaaggcgcgcaacggggccggctgggggcctgagcgggaggccatcatcaacctggccacccagcccaagaggcccatgtccatccccatcatccctgacatccctatcgtggacgcccagagcggggaggactacgacagcttccttatgtacagcgatgacgttctacgctctccatcgggcagccagaggcccagcgtctccgatgacactgagcacctggtgaatggccggatggactttgccttcccgggcagcaccaactccctgcacaggatgaccacgaccagtgctgctgcctatggcacccacctgagcccacacgtgccccaccgcgtgctaagcacatcctccaccctcacacgggactacaactcactgacccgctcagaacactcacactcgaccacactgccgagggactactccaccctcacctccgtctcctcccacgactctcgcctgactgctggtgtgcccgacacgcccacccgctggtgttctctgccctggggcccacatctctcagagtgagctggcaggagccgggtgcgagcggc

SEQ ID NO: 126 - DNA, 602 bp, Homo sapiens
atttagaaatgtaaacatttatttaaaagtaggtagcaagttaaaaatgaatacttgcctgaaatcataaaacataatcaagttctttttaaaacagttaatttttttcctataatttactttcatcgaaagtatattatctttgtttaacatgctagatagaagcaatttagcaacataaaatatattagctatagtatgttcaaaagaatgagaaatataaattcagagatgagaccatcattttttgcagttaaaaaaaaatgttgattctggtgcaacatacactgattatccaggttttacattttagggctgaaaccctgaggaacctgctggtgactgtttagcactgagcagagttcagtgtgcatgcgcttccagagttaaaagctaaagcagactgagaaacaaaaaaccaacatctttgcatttctgagttttcacttgtaatcataggttttcccaaattattagaatgtctataccttagctgttttactagaatgatttatgctagtatagtcacttgtttagaagtcggaaaaagatcattttttctttttagaaattactaagctctgttgtactacagctgatcc

SEQ ID NO: 127 - DNA, 2176 bp, Homo sapiens
atgtaccgccgcagctacgtcttccagacccgcaaggagcagtacgagcacgccgacgaggcttcgcgcgccgccgagcccgagcgcccggccgacgagggctgggctggggcaacgagcctggcggcgctgcaggggctcggcgagcgcgtggccgcccacgtccagcgggcccgcgccctcgagcagcgccatgccgggctccggaggcagctggatgccttccagcgcctgggcgagctggccgggcccgaggacgccctcgcccgccaagtcgagagcaaccgccagcgcgtccgggacctggaggccgagcgcgcccggctggagcgccagggcaccgaggcgcagcgcgcgctcgacgagttccgaagcaagtatgaaaatgagtgcgaatgtcaactcctgctaaaagaaatgcttgaacggcttaacaaggaagctgatgaagccttgctgcataacctacgccttcagctggaagcccaatttctgcaagatgatatcagtgcggcaaaggacaggcacaagaagaatcttctggaagttcagacctatatcagcatcctgcagcagatcatccacaccactcctccagcatccattgtgacgagtgggatgagggaggagaagctcctgacggagcgggaggtggccgccctgcggagtcagctggaggagggccgggaggtgctctcccacctgcaggcgcagagagtggagctgcaggcacagacaacaactctggaacaagctattaaaagtgcccatgagtgttatgacgatgagattcagctttataacgagcagattgagacactgcgcaaggagattgaggagacagagcgggtcctggagaagtcttcttacgactgccggcagctggcggtcgcccagcaaaccctgaagaatgagctggaccggtatcatcgtatcatcgagattgaaggcaacaggctgacctctgccttcattgaaactcccattcccctgttcacccagagccatggagtctctctcagcactggatccggtgggaaagatcttaccagagctctgcaggatataacagcagcaaaaccaagacaaaaagccctccccaagaatgttccaaggagaaaagagattataacaaaagacaaaaccaacggagctctggaagatgcaccattaaaaggtttggaagacacaaagctggtacaggtggtacttaaagaggaaagtgaatctaagtttgaatcagaaagtaaagaagtaagtcccctgacacaagaaggggctccagaggatgtgccagatggagggcagataagcaaaggctttgggaaactatacaggaaggtcaaggagaaagtgagaagccccaaagagcctgagacccccactgagctctacaccaaagagcggcacgtgctggtcacaggggatgccaattacgtggaccctagattctatgtctcctccatcacagctaaaggtggggtggctgtttctgttgcggaagactctgtgctttatgacggccaggtggagccctctcctgagtcacccaagccccctttagagaatgggcaggtgggtctgcaggagaaagaagatggacaaccaattgaccagcagcctatagacaaggagattgagccagatggtgcagagctggaaggccctgaagagaaacgtgagggtgaggagcgggacgaagagtccaggagaccctgtgccatggtcacacccggtgcagaggaaccatctatacctgagcctccaaagcctgcggctgatcaggatggagctgaggtgcttgggactaggagcagaagcctgccagaaaaaggccctcccaaggctttggcctataagacagtggaagtggtggaatctatcgagaagatttccacggagagcattcagacatatgaagaaaccgctgtgatcgtggagaccatgattggaaagacaaagtcagacaagaagaaatcaggagagaagagctcttaaaatgcccaggcttgatgggataaaatgtatttggggccactgtaggggtaatgctttgatattttagagcaaatgataaaagggtgagggttcctgtttggattagaccatagttgacccatctggcattgccaacgaagccttcattaaaatgttttctttgcttgcaaaaaaaaaa

SEQ ID NO: 128 - DNA, 1812 bp, Homo sapiens
tagctaggcaggaagtcggcgcgggcggcgcggacagtatctgtgggtacccggagcacggagatctcgccggctttacgttcacctcggtgtctgcagcaccctccgcttcctctcctaggcgacgagacccagtggctagaagttcaccatgtctattctcaagatccatgccagggagatctttgactctcgcgggaatcccactgttgaggttgatctcttcacctcaaaaggtctcttcagagctgctgtgcccagtggtgcttcaactggtatctatgaggccctagagctccgggacaatgataagactcgctatatggggaagggtgtctcaaaggctgttgagcacatcaataaaactattgcgcctgccctggttagcaagaaactgaacgtcacagaacaagagaagattgacaaactgatgatcgagatggatggaacagaaaataaatctaagtttggtgcgaacgccattctgggggtgtcccttgccgtctgcaaagctggtgccgttgagaagggggtccccctgtaccgccacatcgctgacttggctggcaactctgaagtcatcctgccagtcccggcgttcaatgtcatcaatggcggttctcatgctggcaacaagctggccatgcaggagttcatgatcctcccagtcggtgcagcaaacttcagggaagccatgcgcattggagcagaggtttaccacaacctgaagaatgtcatcaaggagaaatatgggaaagatgccaccaatgtgggggatgaaggcgggtttgctcccaacatcctggagaataaagaaggcctggagctgctgaagactgctattgggaaagctggctacactgataaggtggtcatcggcatggacgtagcggcctccgagttcttcaggtctgggaagtatgacctggacttcaagtctcccgatgaccccagcaggtacatctcgcctgaccagctggctgacctgtacaagtccttcatcaaggactacccagtggtgtctatcgaagatccctttgaccaggatgactggggagcttggcagaagttcacagccagtgcaggaatccaggtagtgggggatgatctcacagtgaccaacccaaagaggatcgccaaggccgtgaacgagaagtcctgcaactgcctcctgctcaaagtcaaccagattggctccgtgaccgagtctcttcaggcgtgcaagctggcccaggccaatggttggggcgtcatggtgtctcatcgttcgggggagactgaagataccttcatcgctgacctggttgtggggctgtgcactgggcagatcaagactggtgccccttgccgatctgagcgcttggccaagtacaaccagctcctcagaattgaagaggagctgggcagcaaggctaagtttgccggcaggaacttcagaaaccccttggccaagtaagctgtgggcaggcaagcccttcggtcacctgttggctacacagacccctcccctcgtgtcagctcaggcagctcgaggcccccgaccaacacttgcaggggtccctgctagttagcgccccaccgccgtggagttcgtaccgcttccttagaacttctacagaagccaagctccctggagccctgttggcagctctagctttgcagtcgtgtaattggcccaagtcattgtttttctcgcctcactttccaccaagtgtctagagtcatgtgagcctcgtgtcatctccggggtggccacaggctagatccccggtggttttgtgctcaaaataaaaagcctcagtgacccatgag

SEQ ID NO: 129 - DNA, 3750 bp, Homo sapiens
ggcggcgcgcgcggccccggcgagcaggggaagccggtggccgcggctgcggaacgggcggaggctgccggtttcgtaaccgtcgctcctcctcgctgactcgcgggctgtgaggcctgggtcggctcgggccgcaccgcgcggggccgctcggagtggaggccgcctgggggcaggcgggctagaggagcaggtacatgtgaagattttttggcagcttagcgtggaaaccattgatcaccctgctctcatttctacctgttctgtgttggcaagggagagtgcccaaatgagcaagatatcgcagcaaaacagcactccaggggtgaacggaattagtgttatccatacccaggcacatgccagcggcttacagcaggttcctcagctggtgcctgctggccctgggggaggaggcaaagctgtggctcccagcaagcagagcaaaaagagttcgcccatggatcgaaacagtgacgagtatcggcaacgccgagagaggaacaacatggctgtgaaaaagagccggttgaaaagcaagcagaaagcacaagacacactgcagagagtcaatcagctcaaagaagagaatgaacggttggaagcaaaaatcaaattgctgaccaaggaattaagtgtactcaaagatttgtttcttgagcatgcacacaaccttgcagacaacgtacagtccattagcactgaaaatacgacagcagatggcgacaatgcaggacagtagacctcaccctttccagactttagagcttgtggcttgaatgttaaaggtgtgaccaccgacaccactcatgtcaatggctgaaagttgtccatttccatgactcaaagacccattggaggctattttctgggatcagcactgaagagttgattagctaaaaatgttagccttgtaattcgaatatctggttttaaatgatagaggtttttgtgggaatcaaaatcccccaaatgttaaggtatatggtaaaaaaagaaatatctgggatcccgatgttcttaataaatcctgacttcccaagaaatgcttcttttttaagttgacaaaaggaatggggaactggcaggccgcgcagaaggttcttggttttaatggataggctgaattggattaagaaaagttgaatgccacctatggtaatctatttgtgattttcttctaaattatgtattataaattcgtagagctatagaaagcaatgagtgtgtaatttggagtgattttatatatggcataaactttgttttaacataattagtactgttttcccccaaaagtacaagtttttgagtagcaatgtcaggttaagtaaagaaacttcatcacatcttataggtagtgtgtggccaattgacttaaaaaatacaaataacatttaggaagcaaatagattaaacacaaaaataaaactaaagcataggaattatgtttttgagatacctttgggcttagattggcattgttttattctaaaaacccaactcagtggtgtagagaaacttgtgtaccaaaattttagtttctgcagatgctagtgtttttttggatacaattttgacaaccaagttagtaaacaaaatatcttaacagtttgatgacacaagctactgatgagggtttggaatattaattcagaaggtagtttctcttgtgttcaaaatagctgccatggggctgttacttttaaagtcaaaattttcttctgaaggctcattttggtatttgatcttaaccaagtgattattagagaaatgtatcaactccatgccatctcccaaaataattgtctaagaaaacttgaaagtgtaaggttttaacctttaatttatttctcttaaatacatcttttgatattgttgttgtgacatttctttttctggttagtgggctttccagactttgtaccactgcttctgtttattcatttatatgcttttgtgtcccataaattatttcagaaaatgctgataaaactcaggatattgacatttttgttgagactaaaaaatggcagtcgctaaagtagggactctagagtctggcttacgtcagtgttggtagtttagattgtctttgtcaacgttttttcttctctcttttgctttcttttctttctctttttttcttagcacagttctagctcaaatttgtgtattttttgtgtgcctgggctggagatgagagactgagtcataactgatttaaaagtttgtgttatcaggtatcttatttgaacatggtcatttttggccacattgctgtttcatactaggacttgggatgatgtagccagaataaaactcaagttgcaccctccggttggtggaagattgctgaccgtgccgtttctgggcaggagaagacatcatggtgtccagcaactcagcaaagccattcttaagagtcgtgaggtccttctgaatgtaaaactggagcccaggagaagctgtcccaggagggctgttaactccctatagagccaggagacaggataggggtttctagggtccaacaccagcttaccttggagtatgaatctacccatgaaggatgagagatgttttgaaaaactagccaggacacacccacaggatcctactggctccttagcagctgattggtgttacataattaacttaattggagatgcattaggtcacttgaatgtataagcaagcacctatggtaggcgctacagacatttaaatctcttgggaattcgatgctcccatggaatttataccagttatatgaattgacttaagtatcttgaaaaagaaactttagagaaagcatcaggggtgtgtactcagtatttcaaatcagaacacaagattggaacttttggaaaaatgggttcaagctttcctattagccatggaaatgcaaagtttagcagaagcaagcaattaggcagagaacaaaaatgttaagcatggtgttgtctatcttattgaagtggttggaaatgaaagcttttaatttgatagatttatcagtataaaattagggaaaccacgtgtggggaatgaatcaatttagagcttcgggaattgtgaggtgacttttgtaacttttgttctgtgtgtgacctgtgaaccactaggatgtgatctgcccttgtgggcaggtccagcatagttaggagttaggctttagcataaatttctagctgcatctgagtctcctgggatgggtgctctttggctggttttggctgcggatggtgagatcagagcagctcttcctgctgctggcccctgcaatcagttgttgggatgccagtgcagatcactaagtagtaagattttaatcaaacacgaccaggtccgaaatgcaggtcatgagtgtgaaattctcaaatttacataaaaagtagaagtatagacagtttaacatttggtattaaaggagaggaaattgtagcagcttttcacgtttcccagtccccattagagggcttgagaccttgtacctgaacaacccattttgcactcagtgctttctgatgccttaggagaattgttttgtttcacaaaagctgggaaggaagaagtccattctgcagctgttagatctgcctctcaggaaaaagtactaacttgttctttttgttcctggctttcatcagtttgtgagatttctctattttttttaaatataattttatttctttcaacaaatataaaataaaaaacaactttggaacaatgaaaaaaaaaaaaaaa

SEQ ID NO: 130 - DNA, 1951 bp, Homo sapiens
cggccgtacctctgcgtgggggctgcctccccggctcccggtgcagacaccatgtacggatttgtgaatcacgccctggagttgctggtgatccgcaattacggccccgaggtgtgggaagacatcaaaaaagaggcacagttagatgaagaaggacagtttcttgtcagaataatatatgatgactccaaaacttatgatttggttgctgctgcaagcaaagtcctcaatctcaatgctggagaaatcctccaaatgtttgggaagatgtttttcgtcttttgccaagaatctggttatgatacaatcttgcgtgtcctgggctctaatgtcagagaatttctacagaaccttgatgctctgcacgaccaccttgctaccatctacccaggaatgcgtgcaccttcctttaggtgcactgatgcagaaaagggcaaaggactcattttgcactactactcagagagagaaggacttcaggatattgtcattggaatcatcaaaacagtggcacaacaaatccatggcactgaaatagacatgaaggttattcagcaaagaaatgaagaatgtgatcatactcaatttttaattgaagaaaaagagtcaaaagaagaggatttttatgaagatcttgacagatttgaagaaaatggtacccaggaatcacgcatcagcccatatacattctgcaaagcttttccttttcatataatatttgaccgggacctagtggtcactcagtgtggcaatgctatatacagagttctcccccagctccagcctgggaattgcagccttctgtctgtcttctcgctggttcgtcctcatattgatattagtttccatgggatcctttctcacatcaatactgtttttgtattgagaagcaaggaaggattgttggatgtggagaaattagaatgtgaggatgaactgactgggactgagatcagctgcttacgtctcaagggtcaaatgatctacttacctgaagcagatagcatactttttctatgttcaccaagtgtcatgaacctggacgatttgacaaggagagggctgtatctaagtgacatccctctgcatgatgccacgcgcgatcttgttcttttgggagaacaatttagagaggaatacaaactcacccaagaactggaaatcctcactgacaggctacagctcacgttaagagccctggaagatgaaaagaaaaagacagacactggcattgtgggcttcaatgctttctgtagcaagcatgcatctggagaaggagccatgaagatcgtcaacctcctcaacgacctctacaccagatttgacacactgactgattcccggaaaaacccatttgtttataaggtggagactgttggtgacaagtatatgacagtgagtggtttaccagagccatgcattcaccatgcacgatccatctgccacctggccttggacatgatggaaattgctggccaggttcaagtagatggtgaatctgttcagataacaatagggatacacactggagaggtagttacaggtgtcataggacagcggatgcctcgatactgtctttttgggaatactgtcaacctcacaagccgaacagaaaccacaggagaaaagggaaaaataaatgtgtctgaatatacatacagatgtcttatgtctccagaaaattcagatccacaattccacttggagcacagaggcccagtgtccatgaagggcaaaaaagaaccaatgcaagtttggtttctatccagaaaaaatacaggaacagaggaaacaaagcaggatgatgactgaatcttggattatggggtgaagaggagtacagactaggttccagttttctcctaacacgtgccaagcccaggagcagttcttccctatggatacagattttcttttgtccttgtccattaccccaagactttcttctaga

SEQ ID NO: 131 - DNA, 4244 bp, Homo sapiens
ggtctcaccatggagcggaaagtgcttgcgctccaggcccgaaagaaaaggaccaaggccaagaaggacaaagcccaaaggaaatctgaaactcagcaccgaggctctgctccccactctgagagtgatctaccagagcaggaagaggagattctgggatctgatgatgatgagcaagaagatcctaatgattattgtaaaggaggttatcatcttgtgaaaattggagatctattcaatgggagataccatgtgatccgaaagttaggctggggacacttttcaacagtatggttatcatgggatattcaggggaagaaatttgtggcaatgaaagtagttaaaagtgctgaacattacactgaaacagcactagatgaaatccggttgctgaagtcagttcgcaattcagaccctaatgatccaaatagagaaatggttgttcaactactagatgactttaaaatatcaggagttaatggaacacatatctgcatggtatttgaagttttggggcatcatctgctcaagtggatcatcaaatccaattatcaggggcttccactgccttgtgtcaaaaaaattattcagcaagtgttacagggtcttgattatttacataccaagtgccgtatcatccacactgacattaaaccagagaacatcttattgtcagtgaatgagcagtacattcggaggctggctgcagaagcaacagaatggcagcgatctggagctcctccgccttccggatctgcagtcagtactgctccccagcctaaaccagctgacaaaatgtcaaagaataagaagaagaaattgaagaagaagcagaagcgccaggcagaattactagagaagcgaatgcaggaaattgaggaaatggagaaagagtcgggccctgggcaaaaaagaccaaacaagcaagaagaatcagagagtcctgttgaaagacccttgaaagagaacccacctaataaaatgacccaagaaaaacttgaagagtcaagtaccattggccaggatcaaacgcttatggaacgtgatacagagggtggtgcagcagaaattaattgcaatggagtgattgaagtcattaattatactcagaacagtaataatgaaacattgagacataaagaggatctacataatgctaatgactgtgatgtccaaaatttgaatcaggaatctagtttcctaagctcccaaaatggagacagcagcacatctcaagaaacagactcttgtacacctataacatctgaggtgtcagacaccatggtgtgccagtcttcctcaactgtaggtcagtcattcagtgaacaacacattagccaacttcaagaaagcattcgggcagagataccctgtgaagatgaacaagagcaagaacataacggaccactggacaacaaaggaaaatccacggctggaaattttcttgttaatccccttgagccaaaaaatgcagaaaagctcaaggtgaagattgctgaccttggaaatgcttgttggcacaaacatttcactgaagatattcaaacaaggcaatatcgttccttggaagttctaatcggatctggctataatacccctgctgacatttggagcacggcatgcatggcctttgaactggccacaggtgactatttgtttgaacctcattcaggggaagagtacactcgagatgaagatcacattgcattgatcatagaacttctggggaaggtgcctcgcaagctcattgtggcaggaaaatattccaaggaatttttcaccaaaaaaggtgacctgaaacatatcacgaagctgaaaccttggggcctttttgaggttctagtggagaagtatgagtggtcgcaggaagaggcagctggcttcacagatttcttactgcccatgttggagctgatccctgagaagagagccactgccgccgagtgtctccggcacccttggcttaactcctaagcccctgcccagcaccacagcagagatcacacactgaccctccgcccttccccttcaagcattttcctcttcccttttcagggtgaagctcttccttcaagagtttctagatcttgttttttttttaatccaacatgttcatttgggtttgcttacttgaccctgtggagatccccacagccattgggcatcctaggtgaatttggccttggttgggctctgccaaagactaatggactaaaatgtgaaacagcctcttgccctgtacctttccttcccattaggacatcctttaaattataagcatcctttttgaaaagagctatgaaggtgtatgagcccatccttttattcattgactctaagagtcaaattttctagtgcatatcctattgccagcataaggatgaggagggggaaagggtcttaattctatgtacagcagagacattaaacttgctgtgtccgggctgcatcatcttcctggactgtttctgttgttctctgtgttcacattttttcctgcaacttttaagctactgtcttttttaaatagctatatgaacaccaaatttgggtaccattttatcactgttcaaagcactgtcaaattcctttcatcctttaatagttaagatctttgaatcttcagtctgatttttaatgtaagcaaaaacagaaccattgaatagtaatttcttgagaacctcaggtgttctataaacagtcctttcctgtatgtcttctattaccctaagaccagagttattttggttggttgttttgttttattttttgtttttgtatccatggctggcactttactcattgcacttgagtttattgccccataactaaaggatcaggatgatggtagaacggagatctgggtttcagagctttcccatttaagaaaaatagatcttgagattctgattcttttccaaacagtcccctgctttcatgtacagctttttctttaccttacccaaaattctggccttgaagcagttttcctctatggctttgcctttctgattttctcagaggctcgagtctttaatataaccccaaatgaaagaaccaaggggaggggtgggatggcacttttttttgttggtcttgttttgttttgttttttggttggttggttcgttattttttaagattagccattctctgctgctatttccctacataatgtcaatttttaaccataattttgacatgattgagatgtacttgaggcttttttgttttaattgagaaaagactttgcaattttttttttaggatgagcctctcctagacttgacctagaatattacatattcctccagtaagtaatactgaagagcaaaagagaggcaggattggggtcacagccgcttcttcagcatggaccaagtgggccttggggattgcagcgttctcgaagtggctgtaggactcgaatttacagaaagccacagaggtgcaacttgaggctctgctagcaagccaccagtgaggctattgggtaaccacctttctatacaggagattggaatctactttgtcatttatccaccacagtgacaaaggaaaagtggtgccgttatgcaatccatttaactcataaacatattactctgagtaactggccagccattcatcggatccttcattgggtactcctgaaatcagacatgttcctgtagaaagaattttaagttaggctttctatgcacctatcaagaatcaagagaatagattgtatcaaacaacggcagggaaatccttcagcaattctaatccactttgggttttcagctgtttttacatctaaagcaatagactagaactgaattatcttctacatagtaaaatcacaattgtggaattacaggaattctggtgatattaaggtgaaataacaaaacacaaaaggccctattttaacagttgatgtgacagtaagttttaatagaacctgtaacttcattttggaaatgcttctccaccaaataagggctttttcccctatttaaggagccagatggattgaaagatgtggaaataggcagctgtagatcttgatcttccaggtaccccatgtacctttattgagcttaattataatactgtcaaattgccacgatctcactaaaggatttctatttgctgtcagttaaaaataaagccctaaatacatttttattctttctactgagggcattgtctgttttctttgtaaatgccgtacaataaacaaattatttaataaccta

SEQ ID NO: 132 - DNA, 1558 bp, Homo sapiens
  modified_base (16)..(1535): n = a, c, g or t/u
aggaggccgcggcggngcagggcggcgactgcctgcctgcctgggttgcggaagtgatagccgccgaccgagcctgctgctttcttgctactgcttcggcttcccgcctacttcccccggacggtgaaggcggcccagctgtggatggtcagatagcccttgtctcccgccgccaatctctggcccctagcagcacggagcagacggcggcagcagcagcagcaggcgaggaggaagatggcgggacggctgccggcctgtgtggtggactgtggcacggggtatacaaaactaggatatgctggaaatacagaaccacagtttatcatcccttcctgtattgctattaaggagtcagcaaaagtgggtgatcaagctcaaaggagggtgatgaaaggtgtttgatgacctagacttcttccattgngtgatgaagcaatagaaaaacctacatattgcaacaaagttggcccaatccgccatggtatagtntgaagattgggactttaatggaaaggtttatggagcaagtgatcttttaaatattttangggcagaaccctgaagaccattattttcttttgactgaacctccattgaatactccagaaaacagggaatatactgctgaaataatgtttgagtccttcaatgttccaggcttgtacattgctgtgcaggctgttcttgccttatctgcatcttggacctcaagacaagtaggagancggacgttgaccggtncggtaatagacagtggagatggtgtcactcatgtcattcctgtggctgaagggtatgtgattggcagctgtattaaacacattccaatcgcagggaccgaagatataacaatattttaattcaagcaacctgctgagagacccgagaagtagggaatccctccaagaaccaacccttggaaacctgctaaggcagtaaaggagcgctatagttatgtctgcccagatttagtaanagaatttaacaagtgcttttggaactaagagctagtatcttggattaactgatgcctgctagtgctttctgattactcgcattctgtttcttgctttaaaagaagagtaaagacaagagtgttggaccagtattgcagttctgtagtgtcatttcttataaaaaacnaaacaacaacaataatttatccaaattggcatatttaaagcctaacattctaataaaggcacaaatttctttttaaatacttgtttcagcctctttnatctctttataagttaactaataaatctattttcttcagacttctgcaatagttctttaaaatcaccacagttagcaagctgacttttgtaatgtgctcnaanaccaanacttgtgaacttttaatatgttgagtgctttcattttgataactggatctccatttgatattttcatttgnataactcatttgcagtctggaaattttttttagtgccagtccctggacatatcattgaaagttaattttctttgcattttaaaatatctggattatggaggaaaagtgatgnaaataaattaaaactgaattacc

SEQ ID NO: 133 - DNA, 4234 bp, Homo sapiens
cgtgagcggcgcagcaagatcccagctcggaccccggacggcgcgcgcccccgaagccccggatcccagtcgggcccgcagctgaccgccagattactgtgcatcccgaatcacgaccacctgcaccctcctgccccggcccgccccccaagtcctcaggcacccagctccccggcgccccggatcctcctggaccggtccgtccagattcccgcgggaccgacctgtccgcatccccaggaccgccgggctcggtgcaccgcctcggtcccggagccgcccgcctggattgcattccctcctctcctggatctcctgggacccgacgcgagcctgccccggagcccgccgagcgcaccctctctcgggtgcctgcagccccgccggcgcggcccggcccggcgcggcccggctcggctcctagagctgccacggccatggccagagcccgcccgccgccgccgccgtcgccgccgccggggcttctgccgctgctccctccgctgctgctgctgccgctgctgctgctgcccgccggctgccgggcgctggaagagaccctcatggacacaaaatgggtaacatctgagttggcgtggacatctcatccagaaagtgggtgggaagaggtgagtggctacgatgaggccatgaatcccatccgcacataccaggtgtgtaatgtgcgcgagtcaagccagaacaactggcttcgcacggggttcatctggcggcgggatgtgcagcgggtctacgtggagctcaagttcactgtgcgtgactgcaacagcatccccaacatccccggctcctgcaaggagaccttcaacctcttctactacgaggctgacagcgatgtggcctcagcctcctcccccttctggatggagaacccctacgtgaaagtggacaccattgcacccgatgagagcttctcgcggctggatgccggccgtgtcaacaccaaggtgcgcagctttgggccactttccaaggctggcttctacctggccttccaggaccagggcgcctgcatgtcgctcatctccgtgcgcgccttctacaagaagtgtgcatccaccaccgcaggcttcgcactcttccccgagaccctcactggggcggagcccacctcgctggtcattgctcctggcacctgcatccctaacgccgtggaggtgtcggtgccactcaagctctactgcaacggcgatggggagtggatggtgcctgtgggtgcctgcacctgtgccaccggccatgagccagctgccaaggagtcccagtgccgcccctgtccccctgggagctacaaggcgaagcagggagaggggccctgcctcccatgtccccccaacagccgtaccacctccccagccgccagcatctgcacctgccacaataacttctaccgtgcagactcggactctgcggacagtgcctgtaccaccgtgccatctccaccccgaggtgtgatctccaatgtgaatgaaacctcactgatcctcgagtggagtgagccccgggacctgggtggccgggatgacctcctgtacaatgtcatctgcaagaagtgccatggggctggaggggcctcagcctgctcacgctgtgatgacaacgtggagtttgtgcctcggcagctgggcctgacggagcgccgggtccacatcagccatctgctggcccacacgcgctacacctttgaggtgcaggcggtcaacggtgtctcgggcaagagccctctgccgcctcgttatgcggccgtgaatatcaccacaaaccaggctgccccgtctgaagtgcccacactacgcctgcacagcagctcaggcagcagcctcaccctatcctgggcacccccagagcggcccaacggagtcatcctggactacgagatgaagtactttgagaagagcgagggcatcgcctccacagtgaccagccagatgaactccgtgcagctggacgggcttcggcctgacgcccgctatgtggtccaggtccgtgcccgcacagtagctggctatgggcagtacagccgccctgccgagtttgagaccacaagtgagagaggctctggggcccagcagctccaggagcagcttcccctcatcgtgggctccgctacagctgggcttgtcttcgtggtggctgtcgtggtcatcgctatcgtctgcctcaggaagcagcgacacggctctgattcggagtacacggagaagctgcagcagtacattgctcctggaatgaaggtttatattgacccttttacctacgaggaccctaatgaggctgttcgggagtttgccaaggagatcgacgtgtcctgcgtcaagatcgaggaggtgatcggagctggggaatttggggaagtgtgccgtggtcgactgaaacagcctggccgccgagaggtgtttgtggccatcaagacgctgaaggtgggctacaccgagaggcagcggcgggacttcctaagcgaggcctccatcatgggtcagtttgatcaccccaatataatccggctcgagggcgtggtcaccaaaagtcggccagttatgatcctcactgagttcatggaaaactgcgccctggactccttcctccggctcaacgatgggcagttcacggtcatccagctggtgggcatgttgcggggcattgctgccggcatgaagtacctgtccgagatgaactatgtgcaccgcgacctggctgctcgcaacatccttgtcaacagcaacctggtctgcaaagtctcagactttggcctctcccgcttcctggaggatgacccctccgatcctacctacaccagttccctgggcgggaagatccccatccgctggactgccccagaggccatagcctatcggaagttcacttctgctagtgatgtctggagctacggaattgtcatgtgggaggtcatgagctatggagagcgaccctactgggacatgagcaaccaggatgtcatcaatgccgtggagcaggattaccggctgccaccacccatggactgtcccacagcactgcaccagctcatgctggactgctgggtgcgggaccggaacctcaggcccaaattctcccagattgtcaataccctggacaagctcatccgcaatgctgccagcctcaaggtcattgccagcgctcagtctggcatgtcacagcccctcctggaccgcacggtcccagattacacaaccttcacgacagttggtgattggctggatgccatcaagatggggcggtacaaggagagcttcgtcagtgcggggtttgcatcttttgacctggtggcccagatgacggcagaagacctgctccgtattggggtcaccctggccggccaccagaagaagatcctgagcagtatccaggacatgcggctgcagatgaaccagacgctgcctgtgcaggtctgacaccggctcccacggggaccctgaggaccgtgcagggatgccaagcagccggctggactttcggactcttggacttttggatgcctggccttaggctgtggcccagaagctggaagtttgggaaaggcccaagctgggacttctccaggcctgtgttccctccccaggaagtgcgccccaaacctcttcatattgaagatggattaggagagggggtgatgacccctccccaagcccctcagggcccagaccttcctgctctccagcaggggatccccacaacctcacacttgtctgttcttcagtgctggaggtcctggcagggtcaggctggggtaagccggggttccacagggcccagccctggcaggggtctggccccccaggtaggcggagagcagtccctccctcaggaactggaggaggggactccaggaatggggaaatgtgacaccaccatcctgaagccagcttgcacctccagtttgcacagggatttgttctgggggctgagggccctgtccccacccccgcccttggtgctgtcataaaagggcaggcaggggcaggctgaggagttgccctttgccccccagagactgactctcagagccagagatgggatgtgtgagtgtgtgtgtgtgtgtgtgtgtgtgcgcgcgcgcgcgcgtgtgtgtgtgcacgcactggcctgcacagagagcatgggtgagcgtgtaaaagcttggccctgtgccctacaatggggccagctgggccgacagcagaataaaggcaataagatgaaaaaaaaaaaaaaa

SEQ ID NO: 134 - DNA, 636 bp, Homo sapiens
tattatatgaatattttaatgcaaaatgcttaacacttaaaattagcaaagcgtcatttaaattaaaattccatttaactaaagatggttaaccccaagaaattgtacagtagttgatttctgctatataatgccagtcctatgccatacaataagaactgcaacattagctgtcacttcctccattgctcttctggaccctaagggatgagggaggggactcagacacaaaacacaacccaaataaactgtgcagtgattcctaatagttataaacccaatctaagttgtccaaacagctgaagaataactgcaggtattgttccagagctgatacgaggttttgcttttacagcctggtaaaagttctgcactaggtgagaagtcacagtttaaggatgcatgttctgtaaatagttactacatatacacatttacggtctgtaacactaggaatatacattggacagagtaccctcacaagttggggacagtttaaaaaagagatggggtacatgaatctcaaagtccacggaatcctgccttgagagtttgtacagctggctgtaattcattccaatgtgcagggagataaggtttggcaaaatggattcactggcttcagcaaggcactgt

SEQ ID NO: 135 - DNA, 1649 bp, Homo sapiens
ccgtcctgtcctggctgctcgctctgcttcgctgcgccgccactatgctctccctccgtgtcccgctcgcgcccatcacggacccgcagcagctgcagctctcgccgctgaaggggctcagcttggtcgacaaggagaacacgccgccggccctgagcgggacccgcgtcctggccagcaagaccgcgaggaggatcttccaggagcccacggagccgaaaactaaagcagctgcccccggcgtggaggatgagccgctgctgagagaaaacccccgccgctttgtcatcttccccatcgagtaccatgatatctggcagatgtataagaaggcagaggcttccttttggaccgccgaggaggtggacctctccaaggacattcagcactgggaatccctgaaacccgaggagagatattttatatcccatgttctggctttctttgcagcaagcgatggcatagtaaatgaaaacttggtggagcgatttagccaagaagttcagattacagaagcccgctgtttctatggcttccaaattgccatggaaaacatacattctgaaatgtatagtcttcttattgacacttacataaaagatcccaaagaaagggaatttctcttcaatgccattgaaacgatgccttgtgtcaagaagaaggcagactgggccttgcgctggattggggacaaagaggctacctatggtgaacgtgttgtagcctttgctgcagtggaaggcattttcttttccggttcttttgcgtcgatattctggctcaagaaacgaggactgatgcctggcctcacattttctaatgaacttattagcagagatgagggtttacactgtgattttgcttgcctgatgttcaaacacctggtacacaaaccatcggaggagagagtaagagaaataattatcaatgctgttcggatagaacaggagttcctcactgaggccttgcctgtgaagctcattgggatgaattgcactctaatgaagcaatacattgagtttgtggcagacagacttatgctggaactgggttttagcaaggttttcagagtagagaacccatttgactttatggagaatatttcactggaaggaaagactaacttctttgagaagagagtaggcgagtatcagaggatgggagtgatgtcaagtccaacagagaattcttttaccttggatgctgacttctaaatgaactgaagatgtgcccttacttggctgattttttttttccatctcataagaaaaatcagctgaagtgttaccaactagccacaccatgaattgtccgtaatgttcattaacagcatctttaaaactgtgtagctacctcacaaccagtcctgtctgtttatagtgctggtagtatcaccttttgccagaaggcctggctggctgtgacttaccatagcagtgacaatggcagtcttggctttaaagtgaggggtgaccctttagtgagcttagcacagcgggattaaacagtcctttaaccagcacagccagttaaaagatgcagcctcactgcttcaacgcagattttaatgtttacttaaatataaacctggcactttacaaacaaataaacattgtttgtactcacaaaaaaaaaaaaaaaaaaaaaaa

SEQ ID NO: 136 - DNA, 1389 bp, Homo sapiens
cgcggacttctgccaagcaccggctcatgtgaggctcgcggcacagcgttctctgggctccccagaagccagcctttcgctcccggacccggcagcccgagcaggagccgtgggaccgggcgccagcaccctctgcggcgtgtcatgggcccgcgccgccggagccgaaagcccgaggccccgaggaggcgcagcccgagcccgaccccgacccccggcccctcccggcggggcccctccttaggcgcttcctcccatcaacacagtcggcggagacaaggttggctaaaggagatccgaaagcttcagaagagcacacacctcttgataaggaagctgcccttcagccgcctggcaagagaaatatgtgttaaattcactcgtggtgtggacttcaattggcaagcccaggccctattggccctacaagaggcagcagaagcatttctagttcatctctttgaggacgcctatctcctcaccttacatgcaggccgagttactctcttcccaaaggatgtgcaactggcccggaggatccggggccttgaggagggactcggctgagctcctgcacccagtgtttctgtcagtctttcctgctcagccaggggggatgataccggggactctccagagccatgactagatccaatggattctgcgatgctgtctggactttgctgtctctgaacagtatgtgtgtgttgctttaaatatttttcttttttttgagaaggagaagactgcatgactttcctctgtaacagaggtaatatatgagacaatcaacaccgttccaaaggcctgaaaataattttcagataaagagactccaaggttgactttagtttgtgagttactcatgtgactatttgaggattttgaaaacatcagatttgctgtggtatgggagaaaaggttatgtacttattattttagctctttctgtaatatttacattttttaccatatgtacatttgtacttttattttacacataagggaaaaaataagaccactttgagcagttgcctggaaggctgggcatttccatcatatagacctctgcccttcagagtagcctcaccattagtggcagcatcatgtaactgagtggactgtgcttgtcaacggatgtgtagcttttcagaaacttaattggggatgaatagaaaacctgtaagctttgatgttctggttacttctagtaaattcctgtcaaaatcaattcagaaattctaacttggagaatttaacattttactcttgtaaatcatagaagatgtatcataacagttcagaattttaaagtacattttcgatgcttttatgggtatttttgtagtttctttgtagagagataataaaaatcaaaatatttaatga

SEQ ID NO: 137 - DNA, 2401 bp, Homo sapiens
gggggtaactggggaagtttctgggcccacaagaaaatgtaggtagtcttagggttaggtctcagctgtcaggaacttgcccctgcccataagatcctaaagggcccccatttgactctcaccagacagttagaacttgtttcctcctccgtgtcagccatcaagaggtgcttggggggctgtgcccagcaggacctcactgcccagcagatcagcaggggagccaagtggcctagatctgctgtggagtacccgactgtttgcctgcctgtctgccctcctcttcacctcattctcatcactgacgtctaccattggcttggaaatcagaaacccatatccatctagatgattgattttgatgatgtggctgcaataaacccagaactcttacagcttcttcccttacatccgaaggacaatctgcccttgcaggaaaatgtaacaatccagaaacaaaaacggagatccgtcaactccaaaattcctgctccaaaagaaagtcttcgaagccgctccactcgcatgtccactgtctcagagcttcgcatcacggctcaggagaatgacatggaggtggagctgcctgcagctgcaaactcccgcaagcagttttcagttcctcctgcccccactaggccttcctgccctgcagtggctgaaataccattgaggatggtcagcgaggagatggaagagcaagtccattccatccgtggcagctcttctgcaaaccctgtgaactcagttcggaggaaatcatgtcttgtgaaggaagtggaaaaaatgaagaacaagcgagaagagaagaaggcccagaactctgaaatgagaatgaagagagctcaggagtatgacagtagttttccaaactgggaatttgcccgaatgattaaagaatttcgggctactttggaatgtcatccacttactatgactgatcctatcgaagagcacagaatatgtgtctgtgttaggaaacgcccactgaataagcaagaattggccaagaaagaaattgatgtgatttccattcctagcaagtgtctcctcttggtacatgaacccaagttgaaagtggacttaacaaagtatctggagaaccaagcattctgctttgactttgcatttgatgaaacagcttcgaatgaagttgtctacaggttcacagcaaggccactggtacagacaatctttgaaggtggaaaagcaacttgttttgcatatggccagacaggaagtggcaagacacatactatgggcggagacctctctgggaaagcccagaatgcatccaaagggatctatgccatggcctcccgggacgtcttcctcctgaagaatcaaccctgctaccggaagttgggcctggaagtctatgtgacattcttcgagatctacaatgggaagctgtttgacctgctcaacaagaaggccaagctgcgcgtgctggaggacggcaagcaacaggtgcaagtggtggggctgcaggagcatctggttaactctgctgatgatgtcatcaagatgctcgacatgggcagcgcctgcagaacctctgggcagacatttgccaactccaattcctcccgctcccacgcgtgcttccaaattattcttcgagctaaagggagaatgcatggcaagttctctttggtagatctggcagggaatgagcgaggcgcagacacttccagtgctgaccggcagacccgcatggagggcgcagaaatcaacaagagtctcttagccctgaaggagtgcatcagggccctgggacagaacaaggctcacaccccgttccgtgagagcaagctgacacaggtgctgagggactccttcattggggagaactctaggacttgcatgattgccacgatctcaccaggcataagctcctgtgaatatactttaaacaccctgagatatgcagacagggtcaaggagctgagcccccacagtgggcccagtggagagcagttgattcaaatggaaacagaagagatggaagcctgctctaacggggcgctgattccaggcaatttatccaaggaagaggaggaactgtcttcccagatgtccagctttaacgaagccatgactcagatcagggagctggaggagaaggctatggaagagctcaaggagatcatacagcaaggaccagactggcttgagctctctgagatgaccgagcagccagactatgacctggagacctttgtgaacaaagcggaatctgctctggcccagcaagccaagcatttctcagccctgcgagatgtcatcaaggccttacgcctggccatgcagctggaagagcaggctagcagacaaataagcagcaagaaacggccccagtgacgactgcaaataaaaatctgtttggttccaaaaaaaa

SEQ ID NO: 138 - DNA, 2501 bp, Homo sapiens
cgaaaagattcttaggaacgccgtaccagccgcgtctctcaggacagcaggcccctgtccttctgtcgggcgccgctcagccgtgccctccgcccctcaggttctttttctaattccaaataaacttgcaagaggactatgaaagattatgatgaacttctcaaatattatgaattacatgaaactattgggacaggtggctttgcaaaggtcaaacttgcctgccatatccttactggagagatggtagctataaaaatcatggataaaaacacactagggagtgatttgccccggatcaaaacggagattgaggccttgaagaacctgagacatcagcatatatgtcaactctaccatgtgctagagacagccaacaaaatattcatggttcttgagtactgccctggaggagagctgtttgactatataatttcccaggatcgcctgtcagaagaggagacccgggttgtcttccgtcagatagtatctgctgttgcttatgtgcacagccagggctatgctcacagggacctcaagccagaaaatttgctgtttgatgaatatcataaattaaagctgattgactttggtctctgtgcaaaacccaagggtaacaaggattaccatctacagacatgctgtgggagtctggcttatgcagcacctgagttaatacaaggcaaatcatatcttggatcagaggcagatgtttggagcatgggcatactgttatatgttcttatgtgtggatttctaccatttgatgatgataatgtaatggctttatacaagaagattatgagaggaaaatatgatgttcccaagtggctctctcccagtagcattctgcttcttcaacaaatgctgcaggtggacccaaagaaacggatttctatgaaaaatctattgaaccatccctggatcatgcaagattacaactatcctgttgagtggcaaagcaagaatccttttattcacctcgatgatgattgcgtaacagaactttctgtacatcacagaaacaacaggcaaacaatggaggatttaatttcactgtggcagtatgatcacctcacggctacctatcttctgcttctagccaagaaggctcggggaaaaccagttcgtttaaggctttcttctttctcctgtggacaagccagtgctaccccattcacagacatcaagtcaaataattggagtctggaagatgtgaccgcaagtgataaaaattatgtggcgggattaatagactatgattggtgtgaagatgatttatcaacaggtgctgctactccccgaacatcacagtttaccaagtactggacagaatcaaatggggtggaatctaaatcattaactccagccttatgcagaacacctgcaaataaattaaagaacaaagaaaatgtatatactcctaagtctgctgtaaagaatgaagagtactttatgtttcctgagccaaagactccagttaataagaaccagcataagagagaaatactcactacgccaaatcgttacactacaccctcaaaagctagaaaccagtgcctgaaagaaactccaattaaaataccagtaaattcaacaggaacagacaagttaatgacaggtgtcattagccctgagaggcggtgccgctcagtggaattggatctcaaccaagcacatatggaggagactccaaaaagaaagggagccaaagtgtttgggagccttgaaagggggttggataaggttatcactgtgctcaccaggagcaaaaggaagggttctgccagagacgggcccagaagactaaagcttcactataatgtgactacaactagattagtgaatccagatcaactgttgaatgaaataatgtctattcttccaaagaagcatgttgactttgtacaaaagggttatacactgaagtgtcaaacacagtcagattttgggaaagtgacaatgcaatttgaattagaagtgtgccagcttcaaaaacccgatgtggtgggtatcaggaggcagcggcttaagggcgatgcctgggtttacaaaagattagtggaagacatcctatctagctgcaaggtataattgatggattcttccatcctgccggatgagtgtgggtgtgatacagcctacataaagactgttatgatcgctttgattttaaagttcattggaactaccaacttgtttctaaagagctatcttaagaccaatatctctttgtttttaaacaaaagatattattttgtgtatgaatctaaatcaagcccatctgtcattatgttactgtcttttttaatcatgtggttttgtatattaataattgttgactttcttagattcacttccatatgtgaatgtaagctcttaactatgtctctttgtaatgtgtaatttctttctgaaataaaaccatttgtgaatataaaaaaaaaaaaaaaaaaaaaaaaaaaaaaaaaaaaaaaaaaaaaaaaaaaaaaaaaaaaaaa

SEQ ID NO: 139 - DNA, 2869 bp, Homo sapiens
ggtccacccagtgcttgcggcctcgcggccgggccggcctgggctgcaatcaatgcggctttgtctgggacgcccacatcccagaggccattcccgggtcggcaaatcggagcgcggccggggcgcgcgggggtgagataagcggccatgtgatcccacctgggctggaaggggaggggcgccaggtgaggcggcggccggcggggcgcgggcggccacgcggggctcctgcagcatggctgtcagcaggaaggactggtccgcgctgtccagccttgcccggcagaggactctggaggatgaggaggaacaggagcgcgagcgcaggcggcggcaccgcaacctgagctccaccacggacgatgaggctcccaggctcagccagaatggagaccggcaggcctctgcttctgagagactaccgagcgtggaagaagcagaggtgcccaagccactgcccccagcctccaaagatgaggacgaggacatccagagcatcctcagaacacggcaggagcggaggcagaggcggcaggtggtggaggctgcacaggcccccatccaggagaggctggaggcagaggaggggaggaacagcttgagccctgtgcaggccacacagaaacccctagtctccaagaaggaactggaaatcccacctcgccggagactgagtcgggaacagcggggcccctgggccctggaggaggagagcttggtgggcagggagccagaagagaggaagaaaggggttccagaaaagtccccagtcttggagaagtcctccatgccaaagaagacggcacctgaaaagagcctggtctccgataaaacctccatctctgagaaggtgctggcctcagagaagacatctctatcagagaagatagcagtgtcagagaaaagaaacagctcagagaagaagtctgttctagaaaaaaccagtgtctctgagaagtcgctggccccagggatggcactgggctcaggaaggaggctggtgtctgagaaagcttccatctttgagaaggcactggcctcagagaagagcccaactgcagatgctaagccggccccaaagagggccacagcctcagagcagcccctggcgcaggagccgccagcctctgggggaagcccagccaccaccaaggagcagagaggaagggccctccctgggaagaacctgccctctttggcaaagcagggggcttcagaccctccgactgtggcctcccgcctcccacccgtcacactccaggtgaaaatccccagcaaggaggaagaggcagatatgtcctcacccacacagcgaacctacagcagctccctcaaacgctccagccccaggaccatctcctttcggatgaaacccaagaaagaaaactcggaaacaaccctaactcgcagtgccagcatgaagctcccagacaacacagtgaagttgggagagaagctggagagataccacacggccatacggagatcagaatctgtcaagtctcggggtctgccttgcactgagttattcgtggctcctgtgggtgtagccagcaagcgccacctctttgagaaggaactggcgggccagagccgagcagaaccagcctccagccggaaggagaacttgaggctctcaggggttgtgacatcaaggctcaacctgtggatcagcaggacccaggaatctggagatcaggacccccaggaggcacagaaagcatcatctgcaaccgagaggactcagtggggacagaaatctgactcctcgctggacgctgaggtgtgacaagccccgccaagacagacctgcaagtcttcgtctcaagggacctccctcatgccaggcccctgcctctcacagcagcaccctttcctctcattgtccctgttccctttttgcctgtggatctgtttggccagggtccctggggtcaggaatatttgcaagactcagccagctccttcccagcccagcctcttggggctgggactttctcaccctgcggcaggcacaacagatgctgggacccagtctctgcccaggtcacagcacaagtgcacatcagcactatggggcctatgtcctgcccagagacctctgctccttcctgctcacatccacagtcagggcacggcgcccctcaagaactccagagtcacctgtctcatcggctcccagcaagtgcctctttgtctatgatgtcccccttctctgaggcctggacccacccatctttgtccctggggcctgctcccagccactgaggcccgctctggccaggggagaaggagctgccgtgcgtcttccctgtgccccgtctccctgcttggttctcccctcccttccctggccggctgccatggccaggagctaagtgcctttttgtgtgcaaccacttaccctttctctgaaaaacctgttctcaggaaggatctgataaactcatttactctcaggtgtaagagactgatgagaccttagaagcgaattcctctctggaggccttgctttctagcagaggtcacctgaagtgtgtgaggaggatcatcattttcctcatcccccctcttctcacattaaggtggtggcttgccactcagcagtcctagcttggtgactgggaactgccacatacagggccaggcctaccctccttccccacaagccccctccaacccccacccccatgctctggacctcatggctcctatgagcttggagcatggtgaaccatcagagaatctagaaccaaccaagctaggaacatcagcctggtgccctgttaaccccttaaagctgtggtttacaacttttcaaaaatttaaatcattagaaaaaaaaaaaaaaaaaaaaaaaaaaaaaaaa

SEQ ID NO: 140 - DNA, 461 bp, Homo sapiens
aaataaaagggatgcgtatcagagtgtaagaactggaaattacttccacagtttaaagaattaataagagaatgctggttcaatttcttaaagatggaaagcttaccaaaatgccatcagagtctgtgaactacttataataaacagcaggatccccactggctaggctgccgtgcacacagcacccacccgccacccccaggttaccattttaagatattctgtcaatgcttagttaaaaataagacttacttaagagaccaacaaaaaaaaatcaattaaacttttattgaagactatccagtggcaagaataccatgtgtattatactatgttttagacactcaataaagaattcattaagatgattctcacaacgcactcatcaaaacagccttaaatattgttaaaaagcgcattgaagcgcctgtcctgagttctaacaggttttaaatttagat

SEQ ID NO: 141 - DNA, 8747 bp, Homo sapiens
caattctgaatcctgccttttgcacttaatgtttcataagtatttccccatgtcactaaaaattcttccaaataacattcacgatgtccatatggaatttcagatgtggatgaaccaaaatcttgtcaactattccactaacagtggttatttagggatgttcagacatttcactatttaaaaaaaaatgtttccacaaatacctttgtggcataagtttttatgagtggagttactgttctgaagttcctgctgaatagaaaatgctttccagtgaggctgtcccaagccacattcccatcagtgacaagcgagagacagctggtcttttcaaatccggagaccaaatattatctttgaaaaaaaatggatttttgcctaatttggtagtcaccaaatagcatctcattgttcttttaattatctgcttccttttagtagagatccctaaaaagatctgaaaggagtcttcagataaaggaaggagctttcttttgtctgtctacaatcaacaaatatttattatgcaaaccattttgctccgagttttctcctctttccctttttggacagatttgggagatctcacctttcaggttttagacatcgtgcagggaggagttttgaggtagggtgcagcttacggtccaggataaaacatactgattctgccactaccaggctttgtgaaaagcaagtcatgaaaacgctctgaaattctagaccttcagtagataggatctaccgtgtctataaaaatatgaagatccttaagttttattaaagattcgaaaaaagtaaaagtgtttttacggttttattttcatttttatttcttaccgttatcgtttattataaaggatattataaaggatacagatgaagagatacgtaatgcaaggcctgtgagaaggggcgtggagcttccgaaacctcttccagccaccaccctccaagaacctggagtttctttttttttttttaattctacaaatgtaatattagaattgattttatctggccattagtgtgtgtcctaactcgttcgtttctgagagtcccatctcccggcccgggatatcatctttcctgtgtcagtgaaagtgcagagtagatgagaacctttaaccaccaacattagggaggggtcccagacaaagggggtaagtcatgctctgtagagaaaaggttccctgcctccgaactacctctggaacactccagtaaatgtttcctcttttgatatagaaaagagggatcgtgtgtagagtgcagtctgggcaatccctctcctcgggaccatttcggggtaggggcctctggggtccgtgtcgcgacgcacgcgcctcggtcccagctatctccgcagcgggccaccccgcctgcggacgcagtttctcggccccgccccacactcgctcccccgccccacccagtctccgcgccggagggaagtggcgcgagggggaaagcactgtctgcgcgcccactgcaaacctcagccagtctgagatcgctttaaacgtctgacccccacccccactccgccccgcccagttcttcaacctaatttctgattcgtgccaaagcttgtcctctgctcaaaatcgtggaagacgccgagtatggggaccgaagacctgggttcaagcccggcttggaatccctgcccatccctggcatttcatctctccgggcttatttgctggtttctccgaatgcgggccttgtctggttcacgctggatccccaacgcctagaacagtgcgtggcacgcagttcgtccttctataaatatcggactaaatgcatctctgtgatggtaatacccacacggtgttgtgagaatgaatgagtgattctgtgcaagttcctagtgatctgttacaaaaagtactggtcgctaaattactcttataataaagcatacttttaggataataaagcactattcgcgaattggttaccgctattatgaaattactgagcaatacatatctacatctgatcagtctccagaattatgccaaatcctaccttcttctgaaagtatctcctaattatctgcacctgaccctagtgatgctgtgaatgtgcaagtatagctacatcctccgaaggaaaggatctttactccttttacctcctgaatgggctgcgtctgctgaaagcgcgggggaatgggcggttggaagcttggccctacttccagcattgccgcctactggttgggttactccagcaagtcactccccttccctgggcctcagtgtctctactgtagcattcccaggtctggaattccatccactttagcaaggatggacgcgccacagagagacgcgttcctagcccgcgcttcccacctgtcttcaggcgcatcccgcttccctcaaacttaggaaatgcctctgggaggtcctgtccggctccggactcactaccgaccacccgcaaacagcagggtcccctgggcttcccaagccgcgcacctctccgccccgcccctgcgccctccttcctcgcgtctgcccctctcccccaccccgccttctccctccccgccccagcggcgcatgcgccgcgctcggagcgtgtttttataaaagtccggccgcggccagaaacttcagtttgttggctgcggcagcaggtagcaaagtgacgccgagggcctgagtgctccagtagccaccgcatctggagaaccagcggttaccatggaggggatcagtgtaagtccagtttcaacctgctttgtcataaatgtacaaacgtttgaacttagagcgcagcccctctccgagcgggcagaagcggccaggacattggaggtacccgtactccaaaaaagggtcaccgaaaggagttttcttgaccatgcctatatagtgcgggtgggtggggggggagcaggattggaatctttttctctgtgagtcgaggagaaacgactggaaagagcgttccagtggctgcatgtgtctcccccttgagtcccgccgcgcgcggcggcttgcacgctgtttgcaaacgtaagaacattctgtgcacaagtgcagagaaggcgtgcgcgctgcctcgggactcagaccaccggtctcttccttggggaagcggggatgtcttggagcgagttacattgtctgaatttagaggcggagggcggcgtgcctgggctgagttcccaggaggagattgcgcccgctttaacttcggggttaagcgcctggtgactgttcttgacactgggtgcgtgtttgttaaactctgtgcggccgacggagctgtgccagtctcccagcacagtaggcagagggcgggagaggcgggtggacccaccgcgccgatcctctgaggggatcgagtggtggcagcagctaggagttgatccgcccgcgcgctttgggtttgagggggaaaccttcccgccgtccgaagcgcgcctcttccccacggccgcgagtgggtcctgcagttcgagagtttggggtcgtgcagaggtcagcggagtggtttgacctcccctttgacaccgcgcagctgccagccctgagatttgcgctccggggataggagcgggtacggggtgaggggcgggggcggttaagaccgcacctgggctgccaggtcgccgccgcgaagactggcaggtgcaagtggggaaaccgtttggctctctccgagtccagttgtgatgtttaaccgtcggtggtttccagaaaccttttgaaaccctcttgctagggagtttttggtttcctgcagcggcgcgcaattcaaagacgctcgcggcggagccgcccagtcgctccccagcaccctgtgggacagagcctggcgtgtcgcccagcggagcccctgcagcgctgcttgcgggcggttggcgtgggtgtagtgggcagccgcggcggcccggggctggacgacccggccccccgcgtgcccaccgcctggaggcttccagctgcccacctccggccgggttaactggatcagtggcggggtaatgggaaaccacccgggagagtgaggaaatgaaacttggggcgaggaccacgggtgcagaccccgttaccttctccacccaggaaaatgccccgctccctaacgtcccaaacgcgccaagtgataaacacgaggatggcaagagacccacacaccggaggagcgcccgcttgggggaggaggtgccgtttgttcattttctgacactcccgcccaatataccccaagcaccgaagggccttcgttttaagaccgcattctctttacccactacaagttgcttgaagcccagaatggtttgtatttaggcaggcgtgggaaaattaagtttttgcgccttaggagaatgagtctttgcaacgcccccgccctccccccgtgatcctcccttctcccctcttccctccctgggcgaaaaacttcttacaaaaagttaatcactgcccctcctagcagcacccaccccaccccccacgccgcctgggagtggcctctttgtgtgtattttttttttcctcctaaggaaggttttttttcttccctctagtgggcggggcagaggagttagccaagatgtgactttgaaaccctcagcgtctcagtgcccttttgttctaaacaaagaattttgtaattggttctaccaaagaaggatataatgaagtcactatgggaaaagatggggaggagagttgtaggattctacattaattctcttgtgcccttagcccactacttcagaatttcctgaagaaagcaagcctgaattggttttttaaattgctttaaaaaatttttttaactgggttaatgcttgctgaattggaagtgaatgtccattcctttgcctcttttgcagatatacacttcagataactacaccgaggaaatgggctcaggggactatgactccatgaaggaaccctgtttccgtgaagaaaatgctaatttcaataaaatcttcctgcccaccatctactccatcatcttcttaactggcattgtgggcaatggattggtcatcctggtcatgggttaccagaagaaactgagaagcatgacggacaagtacaggctgcacctgtcagtggccgacctcctctttgtcatcacgcttcccttctgggcagttgatgccgtggcaaactggtactttgggaacttcctatgcaaggcagtccatgtcatttacacagtcaacctctacagcagtgtcctcatcctggccttcatcagtctggaccgctacctggccatcgtccacgccaccaacagtcagaggccaaggaagctgttggctgaaaaggtggtctatgttggcgtctggatccctgccctcctgctgactattcccgacttcatctttgccaacgtcagtgaggcagatgacagatatatctgtgaccgcttctaccccaatgacttgtgggtggttgtgttccagtttcagcacatcatggttggccttatcctgcctggtattgtcatcctgtcctgctattgcattatcatctccaagctgtcacactccaagggccaccagaagcgcaaggccctcaagaccacagtcatcctcatcctggctttcttcgcctgttggctgccttactacattgggatcagcatcgactccttcatcctcctggaaatcatcaagcaagggtgtgagtttgagaacactgtgcacaagtggatttccatcaccgaggccctagctttcttccactgttgtctgaaccccatcctctatgctttccttggagccaaatttaaaacctctgcccagcacgcactcacctctgtgagcagagggtccagcctcaagatcctctccaaaggaaagcgaggtggacattcatctgtttccactgagtctgagtcttcaagttttcactccagctaacacagatgtaaaagacttttttttatacgataaataacttttttttaagttacacatttttcagatataaaagactgaccaatattgtacagtttttattgcttgttggatttttgtcttgtgtttctttagtttttgtgaagtttaattgacttatttatataaattttttttgtttcatattgatgtgtgtctaggcaggacctgtggccaagttcttagttgctgtatgtctcgtggtaggactgtagaaaagggaactgaacattccagagcgtgtagtgaatcacgtaaagctagaaatgatccccagctgtttatgcatagataatctctccattcccgtggaacgtttttcctgttcttaagacgtgattttgctgtagaagatggcacttataaccaaagcccaaagtggtatagaaatgctggtttttcagttttcaggagtgggttgatttcagcacctacagtgtacagtcttgtattaagttgttaataaaagtacatgttaaacttacttagtgttatgttctgatttctgttgacattcttttggctagtagaagacaaaagtaatacatttatggtatgcaaagcactatcctaggtatttcattgtaatattttacttaccccttatcacaactctgatagattctgcttctgttactaattacattttatagaagaggaaacggaggcacagaaagcctaagtaacttggttaaaggcatgtagtaagtatcaaatcctgtattttaaaccaggtaacatgacttaacgaatctgaagccttcaccactttaaattcaaatggaagtttagaaatggccagccagcacctatttgtatgaaaggtcatctttcagaggataagcatgtataaagaagaaaaggtatgcagtcgtgtttggattttactccaccatccacttgtgaaacccaggtctgtgcaatgccagacggtgtgtgctttcctcatccagtatcctcagtgtagataaccatcactcccttttcacagacaagagaactgagattcagagactttccatacattgcactttcaagggggcaaagccaagaactaattctgtttattgttccagctcttgctcttaactcttacctactattgcccttcagaacacctgggcataagtcaactgaactgctaataaagaaagccaaaagtgaatgttttcttcataaaattaaccatgaccaaaatactcctcttgtaatatcttctatgcaaatctcaacacttttattcttaaactatcgcaacacctagcacctcctcaaggactcagccaagcagctacaagttaatactgatatttgttagagtcagaaggaaggtccactgaagcaagctccctgttgctcacattttgcacaagattttggagacttatgtaaccacccgttgctattaacacgaccattgtgcaagccccaggctcttgagtaaatttcagctttggtttctatttaaagataatttctaaactctagccatacctacctcacattggaacacaaacagggtacactccaggcatgcactcagataataagtaggatataattacgacaatatttggtctacttttagtaattgtttctggcacagaaaatccattttggaggaaaaattgcaatgccttatctttctgaggcaaatcacatttgttcaaggcaaattatagatcctgtgaagggaaataacttaattacttaaaatagaatccaatttggctgtacatttttgctgccgtctatggatctggggtaattcaaagtggtattcatattctacttgaggacacaattagatttcagataggaaattatcttgaggtttcttggttttccctgagaagcctaattggatcacccttcatttaagcatagttttacatgcactctctcaaaggcttagtcttaaagccacaaccattgagacagacttcacttgaaccctctctataaatatttattctccgggagacaatagaagaaatccttggaaggcatgctttttctttctcatcttggcttgaaacctccttaccccagattcctctcctttaccgtggagtcacaacaaaaggaactgagccaaaacaaaattcccagtgtcaccagtcttaatggatatttcattctcccttggaacaaagatggaatagctttttttccaaaagaaaaacaagccttggctctctccctgccccaaaagggtgccccccacccccatcattctctgtcccaaccctgccatgttagagcgtctccaaagccttccctgtgtcgtggtttgtctgacaatgtggggaaacccagtctgctggccagcccttgcatgaagtagctgattgttccctctcctcatcccttatgaatggggcccttgaagttcagtcatgtagattcagttgtataatgaaagctaaaatatttaaattgtatgcatgctgccaataacagcatacatctgacatctaacttattaataacattaagcctgcaactaggggggaaagtggatgttttttcttgcaaagcctttgttttcctaaaatgacacttgaaaatttatctccccctactgcaggcttcccagcccccttttataattatgcttaaattaaaataatgattctgggatactcttttggggagataccctacaggctttattttaataattgaactaagtgtttgtgactttctcctagatattgtcaaatattaaataaaggctccataaacaattgagctgtcttattcccagataatacccatttaggaggggcaaggatcc

SEQ ID NO: 142 - DNA, 507 bp, Homo sapiens
tcttggttctcagtgttggaaagtaatatggtaaaacttctcttctccgaggacaatagaatagtatttgttgtatagactgaaccatcctccaaaatttggaagtcaggatcacttgaatgaattagatttgcagctgtaaagcactctttcaggttaactctaccaacaagtttctcggcatctagtttggagggaacatgtaatgtcacatttttgcaggcatcactggcaaatattaagatcgcgagggtcagcaggagcagccggcagagggctccgttccaggagccggaggggcgggctgcctccatggagagggctcggggcaggtcgcgggccgagcgtcgggccggggtaggagggctccgcggggcgagggccgcggccggagcgcagtctgggcccgctgctcatgaggagcgcgaggcggaaggaggtggggcgcgcggagaggtgcttttcttagcttctctgaagcgcctgcctctcatccaaggggctttt

SEQ ID NO: 143 - DNA, 221 bp, Homo sapiens
  modified_base (163): n = a, c, g or t/u
ttgaacataaactcaagattttattgtcttcataataaaagatgacacttagaactggatcacttggccctttctcttcttatctcctcccagttcaaaatgcttttcttcctcttcctgtttcttcttttcttcttgctcccttttctctgccagcaattgntctgtaaactctccgagcaatctgacctcttgagttgcttctggaaaactatggctgc

SEQ ID NO: 144 - DNA, 3805 bp, Homo sapiens
ggctcggctcctagagctgccacggccatggccagagcccgcccgccgccgccgccgtcgccgccgccggggcttctgccgctgctccctccgctgctgctgctgccgctgctgctgctgcccgccggctgccgggcgctggaagagaccctcatggacacaaaatgggtaacatctgagttggcgtggacatctcatccagaaagtgggtgggaagaggtgagtggctacgatgaggccatgaatcccatccgcacataccaggtgtgtaatgtgcgcgagtcaagccagaacaactggcttcgcacggggttcatctggcggcgggatgtgcagcgggtctacgtggagctcaagttcactgtgcgtgactgcaacagcatccccaacatccccggctcctgcaaggagaccttcaacctcttctactacgaggctgacagcgatgtggcctcagcctcctcccccttctggatggagaacccctacgtgaaagtggacaccattgcacccgatgagagcttctcgcggctggatgccggccgtgtcaacaccaaggtgcgcagctttgggccactttccaaggctggcttctacctggccttccaggaccagggcgcctgcatgtcgctcatctccgtgcgcgccttctacaagaagtgtgcatccaccaccgcaggcttcgcactcttccccgagaccctcactggggcggagcccacctcgctggtcattgctcctggcacctgcatccctaacgccgtggaggtgtcggtgccactcaagctctactgcaacggcgatggggagtggatggtgcctgtgggtgcctgcacctgtgccaccggccatgagccagctgccaaggagtcccagtgccgcccctgtccccctgggagctacaaggcgaagcagggagaggggccctgcctcccatgtccccccaacagccgtaccacctccccagccgccagcatctgcacctgccacaataacttctaccgtgcagactcggactctgcggacagtgcctgtaccaccgtgccatctccaccccgaggtgtgatctccaatgtgaatgaaacctcactgatcctcgagtggagtgagccccgggacctgggtgtccgggatgacctcctgtacaatgtcatctgcaagaagtgccatggggctggaggggcctcagcctgctcacgctgtgatgacaacgtggagtttgtgcctcggcagctgggcctgtcggagccccgggtccacaccagccatctgctggcccacacgcgctacacctttgaggtgcaggcggtcaacggtgtctcgggcaagagccctctgccgcctcgttatgcggccgtgaatatcaccacaaaccaggctgccccgtctgaagtgcccacactacgcctgcacagcagctcaggcagcagcctcaccctatcctgggcacccccagagcggcccaacggagtcatcctggactacgagatgaagtactttgagaagagcgagggcatcgcctccacagtgaccagccagatgaactccgtgcagctggacgggcttcggcctgacgcccgctatgtggtccaggtccgtgcccgcacagtagctggctatgggcagtacagccgccctgccgagtttgagaccacaagtgagagaggctctggggcccagcagctccaggagcagcttcccctcatcgtgggctccgctacagctgggcttgtcttcgtggtggctgtcgtggtcatcgctatcgtctgcctcaggaagcagcgacacggctctgattcggagtacacggagaagctgcagcagtacattgctcctggaatgaaggtttatattgacccttttacctacgaggaccctaatgaggctgttcgggagtttgccaaggagatcgacgtgtcctgcgtcaagatcgaggaggtgatcggagctggggaatttggggaagtgtgccgtggtcgactgaaacagcctggccgccgagaggtgtttgtggccatcaagacgctgaaggtgggctacaccgagaggcagcggcgggacttcctaagcgaggcctccatcatgggtcagtttgatcaccccaatataatccggctcgagggcgtggtcaccaaaagtcggccagttatgatcctcactgagttcatggaaaactgcgccctggactccttcctccggctcaacgatgggcagttcacggtcatccagctggtgggcatgttgcggggcattgctgccggcatgaagtacctgtccgagatgaactatgtgcaccgcgacctggctgctcgcaacatccttgtcaacagcaacctggtctgcaaagtctcagactttggcctctcccgcttcctggaggatgacccctccgatcctacctacaccagttccctgggcgggaagatccccatccgctggactgccccagaggccatagcctatcggaagttcacttctgctagtgatgtctggagctacggaattgtcatgtgggaggtcatgagctatggagagcgaccctactgggacatgagcaaccaggatgtcatcaatgccgtggagcaggattaccggctgccaccacccatggactgtcccacagcactgcaccagctcatgctggactgctgggtgcgggaccggaacctcaggcccaaattctcccagattgtcaataccctggacaagctcatccgcaatgctgccagcctcaaggtcattgccagcgctcagtctggcatgtcacagcccctcctggaccgcacggtcccagattacacaaccttcacgacagttggtgattggctggatgccatcaagatggggcggtacaaggagagcttcgtcagtgcggggtttgcatcttttgacctggtggcccagatgacggcagaagacctgctccgtattggggtcaccctggccggccaccagaagaagatcctgagcagtatccaggacatgcggctgcagatgaaccagacgctgcctgtgcaggtctgacaccggctcccacggggaccctgaggaccgtgcagggatgccaagcagccggctggactttcggactcttggacttttggatgcctggccttaggctgtggcccagaagctggaagtttgggaaaggcccaagctgggacttctccaggcctgtgttccctccccaggaagtgcgccccaaacctcttcatattgaagatggattaggagagggggtgatgacccctccccaagcccctcagggcccagaccttcctgctctccagcaggggatccccacaacctcacacttgtctgttcttcagtgctggaggtcctggcagggtcaggctggggtaagccggggttccacagggcccagccctggcaggggtctggccccccaggtaggcggagagcagtccctccctcaggaactggaggaggggactccaggaatggggaaatgtgacaccaccatcctgaagccagcttgcacctccagtttgcacagggatttgtcctgggggctgagggccctgtccccacccccgcccttggtgctgtcataaaagggcaggcaggggcaggctgaggagttgcccgttgccccccagagactgactctcagagccagagatgggatgtgtgagtgtgtgtgtgtgtgtgtgcgcgcgcgcgcgcgtgtgtgtgtgcacgcactggcctgcacagagagcatgggtgagcgtgtaaaagcttggccctgtgccctacagtggggacagctgggccgacagcagaataaaggcaataagatgaa

SEQ ID NO: 145 - DNA, 4744 bp, Homo sapiens
aaataataaagaaattgaaaacaatacattaatataccataacactaaaaagagcaggagcgagagatgagaaagggaatccagcccgctctggagcagtacctggtgaccgccgggggtggggagggggcggctgtcgtcgccgccgccgctgcagcctccatggacaaaagggcactgctagccagccccggcttcgccgccgccgccgccgctgccgccgccccgggcgcgtacatccagatcctcaccacgaacacttccaccacctcctgttcctcctccctccaaagcggcgccgtagccgccggccccctcctccccagtgcccccggcgcggagcagaccgccggcagcctcctctacaccacgccgcacggaccctccagcagagccgggctgctgcagcagccaccagcgctgggacgcggcggcagcggcggcggcggcggccctccggcaaagcgaaggctggagctaggagaaagcggtcatcagtacctctcagatggtttaaaaacccccaagggcaaaggaagagctgcactacgaagtccagatagtccaaaaactccaaaatctccctcagaaaaaacgcggtatgatacgtctcttggtctgctcaccaagaagttcattcagctcctgagccagtcacccgatggggtattggatttgaacaaggcagcagaagtgctaaaagtgcaaaagagaaggatttatgatatcaccaacgttctggaaggcatccacctcattaagaagaagtctaaaaacaacgtccaatggatgggctgcagtctgtctgaggatgggggcatgctggcccagtgtcaaggcctgtcaaaagaagtgaccgagctcagtcaggaagagaagaaattagatgaactgatccaaagctgcaccctggacctcaaactgttaaccgaggattcagagaatcaaaggttagcttatgttacatatcaagatattcgaaaaattagtggccttaaagaccaaactgttatagttgtgaaagcccctccagaaacaagacttgaagtgcctgactcaatagagagcctacaaatacatttggcaagtacccaagggcccattgaggtttacttatgtccagaagagactgaaacacacagtccaatgaaaacaaacaaccaagaccacaatgggaatatccctaaacccgcttccaaagacttggcttcaaccaactcaggacatagcgattgctcagtttctatgggaaacctttctcctctggcctccccagccaacctcttacagcagactgaggaccaaattccttccaacctagaaggaccgtttgtgaacttactgcctcccctgctgcaagaggactatctcctgagcctcggggaggaggaaggcatcagcgatctcttcgatgcttacgatttggaaaagctcccactggtggaagacttcatgtgtagttgattatgcttcgtgtgaactctccttaaaaaccgatatttttttatcatggaccagaacatctgtcatgcagtgttgtcccttcctaccttcttcctccaagagagtatcatgaagtaaactacaaacttcagaagaaagctgacattttaatgaattttttaaaaaattaataaacaaattgtctaaacgcacagttgcaggctcccttgggaaagccctgctttgctccaggctccaagatctcctggctaagtcagcaagtgagaaaatgtgcaatcaggtgtctctcaccccgaattgtccttcctccttcctccccggattggcttgctgtgcctgacggatgggctgtagaatggggtctggccacctggcctgctgggaaacagcaatcttccttaatagcatttcaagccgtgccttctccgcagaatgcatgtctttgaggtctgctaatatggaatggaactgcagcaaatgcaaacttgaagtcatgcaaaagtatgaaatggatttcttcagctcttcttaggaatatttaaattactgtcataattcagtttaagctatgaactgtgtgtcccagtaggaggtcaagaaaacctccacagccttctggatgaagaacctgttttcaaatatacttgttgcagatacagaagactagtagagttctgccactctaagctgttgtggattttcctgtctccatgaaccactcccattcccccgtccccaatgtgtttgtgagtttccagttgatttgtagcaaatgcctacttagttctttgtggattgttctagacttttaatttttttagctgccatttaagcattcctgtggcacccatcaccatttcaatttaattgtttactttgaagcggtttttgcaaattcatattacttaagcagagggagagaacctctactgatcagagcatctaaacctgtgtgatctaaggtttatcagcctctgcaaggagctttgtcccatcgtgcttccattcccaggagggggagcttggagcgagtcagtcctggggcttgctgacatgggtggcccattggaaaggagaaccaggtcagatgatgtaacagccccaaggagcagcaggcatgggtccctccatccttgggcttcccgggcccctgtgacaggggaaagggctctcttacaccgcactcagggagaccacttctcaggatggggtcagatggagagacctctagggagaaagacatccccattgtgtgagtggcatttccttaagctggcaggaacagggagcagccctgtgtcgggggctggaatagttctggccagaccccgttccccttcctctatgaaggaataagttggaccaagggaagtcggggacgtaaaaaatgaagcaaaacaatgccagggtgtctcccgctttactcttcaggaatggtgtcccaagttggaggctttgtgtcagctgcaaatcctaccagttatgtccaagaatggctttccctcgggcaggtggcagcggccatctcccactgggaatatggcgtagtatctccggtccattccttggatgctaaggactgcgggaatgagggagtcagataaagaacaaacctcgaaacgaacagttaaattgaaatgctatgtgcctgacccaatggtaggcacatagtaggcactcaactcatatgtttaattgaattgaaaatatcccttaggaaaaaaaaaaaacacacaaaaaaccacaagagccccagccagtttactccaggtagatttccacaatatgcaaagtggtggtggggtcaagacagatgacaccagcactttaaactctttgtgtgggtatgcgtgggtgtatgtttgggaagaaaaacaaaggtgcagactatcttcctttttttcttcttcagcctccatccctggcctcctcccctcacacacactggacttggtacaaaatgtcggtgtggtcctagatgaagcattggggtgggggagggagagggagctttgtgttaagtgcctactggaaatgcactgtggggttttttcctgtatgggaaaccatttatgccaagcttttccccatttcccatatttatctcatctggttagctgcctctgcttccagctttgtgtaattctctttgccagctgcacaaagctgattttttccaaagtctaaagactgagctcacctggctagattgttgtgtgttttgttgaattttttcataatgtaatgccgtatttattgtttttaaaatgaaaggaatactaataagtcttaaaagttccttcatgcataagatttttttccagttactgggcttaactggtgtacattaattagatgtccatactgtattttgtttgcattaagtaattttctttttgacttagtatccggcacacaaagtgggttagtactacagtatttgcgttactttaagtactaagtatgcaggtttcctggtaccattgagttgctgctattaaagctcacacacgaaatggctaaaagttacaagtgtgcaaattatgactgcgtgagccttagaaaataaaatgtataaagggcaacacatgagctgtcaaacagtgttaggagtgtgtttatatgtacagagttgtgcatagcaatcgttttatttaagttgatatgtagtctactcacattttcattatttagcaattttgtacaaaaatagcaattaatttgtaaacactgccagaatactttctagctgctttgtaattttttaagagtgttattttgtttttgtttttctgttctttgttgtggctcttgttttcatttttgttgtacgtgtagatctgtaaataaaattgcagtatttaaagcttaagctttcaggaaaaagaaaataagaattcagtgtgtgcatgacaactcgtgtgtatgagaaggagggatatgaaggaagatggcttgcagagtaagtcgggtggcaattgtcagggtgtgggaatttcttttcctacggggtacgtgattttgtaaaaaggaagtatttctcccaaaattgggagtaggcaaactactaatcagtttagctttgtgttgtatgctagtttaaaaaagaaaatatgtaatataatgtaaaaaaaaacaaaaaaaagcttttatgatggattttgtaaatagatttgttacagggtgacctgttctctagctgtgatcttaccacttcaaatgggtgtaatttgaataaattttgtatggtaaaggatcaataaaatgattttttttaaga

SEQ ID NO: 146 - DNA, 1378 bp, Homo sapiens
cgacgcgggagccgcacgcgccggacgaggctcgctgcgctccctgttgcccagcgcgggcccgttgaggcggagccctcagttcccggccaggacacggtctgggccgccgaatctccggccgaagagcggcggcggcagcggcggaaaaaaatgaagaatgaaattgctgccgttgtcttctttttcacaaggctagttcgaaaacatgataagttgaaaaaagaggcagttgagaggtttgctgagaaattgaccctaatacttcaagaaaaatataaaaatcactggtatccagaaaaaccatcgaaaggacaggcctacagatgtattcgtgtcaataaatttcagagagttgatcctgatgtcctgaaagcctgtgaaaacagctgcatcttgtatagtgacctgggcttgccaaaggagctcactctctgggtggacccatgtgaggtgtgctgtcggtatggagagaaaaacaatgcattcattgttgccagctttgaaaataaagatgagaacaaggatgagatctccaggaaagttaccagggcccttgataaggttacctctgattatcattcaggatcctcttcttcagatgaagaaacaagtaaggaaatggaagtgaaacccagttcggtgactgcagccgcaagtcctgtgtaccagatttcagaacttatatttccacctcttccaatgtggcaccctttgcccagaaaaaagccaggaatgtatcgagggaatggccatcagaatcactatcctcctcctgttccatttggttatccaaatcagggaagaaaaaataaaccatatcgcccaattccagtgacatgggtacctcctcctggaatgcattgtgaccggaatcactggattaatcctcacatgttagcacctcactaacttcgtttttgattgtgttggtgtcatgttgagaaaaaggtagaataaaccttactacacattaaaagttaaaagttcttactaatagtagtgaagttagatgggccaaaccatcaaacttatttttatagaagttattgagaataatctttcttaaaaaatatatgcactttagatattgatatagtttgagaaattttattaaagttagtcaagtgcctaagtttttaatattggacttgagtatttatatattgtgcatcaactctgttggatacgagaacactgtagaagtggacgatttgttctagcacctttgagaatttactttatggagcgtatgtaagttatttatatacaaggaaatctattttatgtcgttgtttaagagaattgtgtgaaatcatgtagttgcaaataaaaaatagtttgaggcatgaaaaaaaaaaaaaaaaaaaaaaaaaaa

SEQ ID NO: 147 - DNA, 7787 bp, Homo sapiens
gagacaaaggctgccgtcgggacgggcgagttagggacttgggtttgggcgaacaaaaggtgagaaggacaagaagggaccgggcgatggcagcaggggagccccgcgggcgcgcgtcctcgggagtggcgccgtgacacgcatggtttccccggacccgcggcggcgctgacttccgcgagtcggagcggcactcggcgagtccgggactgcgctggaacaatggataacttcttcaccgagggaacacgggtctggctgagagaaaatggccagcattttccaagtactgtaaattcctgtgcagaaggcatcgtcgtcttccggacagactatggtcaggtattcacttacaagcagagcacaattacccaccagaaggtgactgctatgcaccccacgaacgaggagggcgtggatgacatggcgtccttgacagagctccatggcggctccatcatgtataacttattccagcggtataagagaaatcaaatatatacctacatcggctccatcctggcctccgtgaacccctaccagcccatcgccgggctgtacgagcctgccaccatggagcagtacagccggcgccacctgggcgagctgcccccgcacatcttcgccatcgccaacgagtgctaccgctgcctgtggaagcgctacgacaaccagtgcatcctcatcagtggtgaaagtggggcaggtaaaaccgaaagcactaaattgatcctcaagtttctgtcagtcatcagtcaacagtctttggaattgtccttaaaggagaagacatcctgtgttgaacgagctattcttgaaagcagccccatcatggaagctttcggcaatgcgaagaccgtgtacaacaacaactctagtcgctttgggaagtttgttcagctgaacatctgtcagaaaggaaatattcagggcgggagaattgtagattatttattagaaaaaaaccgagtagtaaggcaaaatcccggggaaaggaattatcacatattttatgcactgctggcagggctggaacatgaagaaagagaagaattttatttatctacgccagaaaactaccactacttgaatcagtctggatgtgtagaagacaagacaatcagtgaccaggaatcctttagggaagttattacggcaatggacgtgatgcagttcagcaaggaggaagttcgggaagtgtcgaggctgcttgctggtatactgcatcttgggaacatagaatttatcactgctggtggggcacaggtttccttcaaaacagctttgggcagatctgcggagttacttgggctggacccaacacagctcacagatgctttgacccagagatcaatgttcctcaggggagaagagatcctcacgcctctcaatgttcaacaggcagtagacagcagggactccctggccatggctctgtatgcgtgctgctttgagtgggtaatcaagaagatcaacagcaggatcaaaggcaatgaggacttcaagtctattggcatcctcgacatctttggatttgaaaactttgaggttaatcactttgaacagttcaatataaactatgcaaacgagaaacttcaggagtacttcaacaagcatattttttctttagaacaactagaatatagccgggaaggattagtgtgggaagatattgactggatagacaatggagaatgcctggacttgattgagaagaaacttggcctcctagcccttatcaatgaagaaagccattttcctcaagccacagacagcaccttattggagaagctacacagtcagcatgcgaataaccacttttatgtgaagcccagagttgcagttaacaattttggagtgaagcactatgctggagaggtgcaatatgatgtccgaggtatcttggagaagaacagagatacatttcgagatgaccttctcaatttgctaagagaaagccgatttgactttatctacgatctttttgaacatgtttcaagccgcaacaaccaggataccttgaaatgtggaagcaaacatcggcggcctacagtcagctcacagttcaaggactcactgcattccttaatggcaacgctaagctcctctaatcctttctttgttcgctgtatcaagccaaacatgcagaagatgccagaccagtttgaccaggcggttgtgctgaaccagctgcggtactcagggatgctggagactgtgagaatccgcaaagctgggtatgcggtccgaagaccctttcaggacttttacaaaaggtataaagtgctgatgaggaatctggctctgcctgaggacgtccgagggaagtgcacgagcctgctgcagctctatgatgcctccaacagcgagtggcagctggggaagaccaaggtctttcttcgagaatccttggaacagaaactggagaagcggagggaagaggaagtgagccacgcggccatggtgattcgggcccatgtcttgggcttcttagcacgaaaacaatacagaaaggtcctttattgtgtggtgataatacagaagaattacagagcattccttctgaggaggagatttttgcacctgaaaaaggcagccatagttttccagaagcaactcagaggtcagattgctcggagagtttacagacaattgctggcagagaaaagggagcaagaagaaaagaagaaacaggaagaggaagaaaagaagaaacgggaggaagaagaaagagaaagagagagagagcgaagagaagccgagctccgcgcccagcaggaagaagaaacgaggaagcagcaagaactcgaagccttgcagaagagccagaaggaagctgaactgacccgtgaactggagaaacagaaggaaaataagcaggtggaagagatcctccgtctggagaaagaaatcgaggacctgcagcgcatgaaggagcagcaggagctgtcgctgaccgaggcttccctgcagaagctgcaggagcggcgggaccaggagctccgcaggctggaggaggaagcgtgcagggcggcccaggagttcctcgagtccctcaatttcgacgagatcgacgagtgtgtccggaatatcgagcggtccctgtcggtgggaagcgaattttccagcgagctggctgagagcgcatgcgaggagaagcccaacttcaacttcagccagccctacccagaggaggaggtcgatgagggcttcgaagccgacgacgacgccttcaaggactcccccaaccccagcgagcacggccactcagaccagcgaacaagtggcatccggaccagcgatgactcttcagaggaggacccatacatgaacgacacggtggtgcccaccagccccagtgcggacagcacggtgctgctcgccccatcagtgcaggactccgggagcctacacaactcctccagcggcgagtccacctactgcatgccccagaacgctggggacttgccctccccagacggcgactacgactacgaccaggatgactatgaggacggtgccatcacttccggcagcagcgtgaccttctccaactcctacggcagccagtggtcccccgactaccgctgctctgtggggacctacaacagctcgggtgcctaccggttcagctctgagggggcgcagtcctcgtttgaagatagtgaagaggactttgattccaggtttgatacagatgatgagctttcataccggcgtgactctgtgtacagctgtgtcactctgccgtatttccacagctttctgtacatgaaaggtggcctgatgaactcttggaaacgccgctggtgcgtcctcaaggatgaaaccttcttgtggttccgctccaagcaggaggccctcaagcaaggctggctccacaaaaaaggggggggctcctccacgctgtccaggagaaattggaagaagcgctggtttgtcctccgccagtccaagctgatgtactttgaaaacgacagcgaggagaagctcaagggcaccgtagaagtgcgaacggcaaaagagatcatagataacaccaccaaggagaatgggatcgacatcattatggccgataggactttccacctgattgcagagtccccagaagatgccagccagtggttcagcgtgctgagtcaggtccacgcgtccacggaccaggagatccaggagatgcatgatgagcaggcaaacccacagaatgctgtgggcaccttggatgtggggctgattgattctgtgtgtgcctctgacagccctgatagacccaactcgtttgtgatcatcacggccaaccgggtgctgcactgcaacgccgacacgccggaggagatgcaccactggataaccctgctgcagaggtccaaaggggacaccagagtggagggccaggaattcatcgtgagaggatggttgcacaaagaggtgaagaacagtccgaagatgtcttcactgaaactgaagaaacggtggtttgtactcacccacaattccctggattactacaagagttcagagaagaacgcgctcaaactggggaccctggtcctcaacagcctctgctctgtcgtccccccagatgagaagatattcaaagagacaggctactggaacgtcaccgtgtacgggcgcaagcactgttaccggctctacaccaagctgctcaacgaggccacccggtggtccagtgccattcaaaacgtgactgacaccaaggccccgatcgacacccccacccagcagctgattcaagatatcaaggagaactgcctgaactcggatgtggtggaacagatttacaagcggaacccgatccttcgatacacccatcaccccttgcactccccgctcctgccccttccgtatggggacataaatctcaacttgctcaaagacaaaggctataccacccttcaggatgaggccatcaagatattcaattccctgcagcaactggagtccatgtctgacccaattccaataatccagggcatcctacagacagggcatgacctgcgacctctgcgggacgagctgtactgccagcttatcaaacagaccaacaaagtgccccaccccggcagtgtgggcaacctgtacagctggcagatcctgacatgcctgagctgcaccttcctgccgagtcgagggattctcaagtatctcaagttccatctgaaaaggatacgggaacagtttccaggaaccgagatggaaaaatacgctctcttcacttacgaatctcttaagaaaaccaaatgccgagagtttgtgccttcccgagatgaaatagaagctctgatccacaggcaggaaatgacatccacggtctattgccatggcggcggctcctgcaagatcaccatcaactcccacaccactgctggggaggtggtggagaagctgatccgaggcctggccatggaggacagcaggaacatgtttgctttgtttgaatacaacggccacgtcgacaaagccattgaaagtcgaaccgtcgtagctgatgtcttagccaagtttgaaaagctggctgccacatccgaggttggggacctgccatggaaattctacttcaaactttactgcttcctggacacagacaacgtgccaaaagacagtgtggagtttgcatttatgtttgaacaggcccacgaagcggttatccatggccaccatccagccccggaagaaaacctccaggttcttgctgccctgcgactccagtatctgcagggggattatactctgcacgctgccatcccacctctcgaagaggtttattccctgcagagactcaaggcccgcatcagccagtcaaccaaaaccttcaccccttgtgaacggctggagaagaggcggacgagcttcctagaggggaccctgaggcggagcttccggacaggatccgtggtccggcagaaggtcgaggaggagcagatgctggacatgtggattaaggaagaagtctcctctgctcgagccagtatcattgacaagtggaggaaatttcagggaatgaaccaggaacaggccatggccaagtacatggccttgatcaaggagtggcctggctatggctcgacgctgtttgatgtggagtgcaaggaaggtggcttccctcaggaactctggttgggtgtcagcgcggacgccgtctccgtctacaagcgtggagagggaagaccactggaagtcttccagtatgaacacatcctctcttttggggcacccctggcgaatacgtataagatcgtggtcgatgagagggagctgctctttgaaaccagtgaggtggtggatgtggccaagctcatgaaagcctacatcagcatgatcgtgaagaagcgctacagcacgacacgctccgccagcagccagggcagctccaggtgaaggcgggacagagcccacctgtctttgctacctgaacgcaccaccctctggcctaggctggctccagtgtgccatgcccagccaaaacaaacacagagctgcccaggctttctggaagcttctggtctgagggaggtgtctccgaggatccttttgcctgccgccttcattgatcctgtattaagctgtcaactttaacagtctgcacagtttccaaagctttactactcttagaggacacatgccttaaaaaaggaggggaggaaccacgctgccaccaaagcagccggaagtgccttaacttgtggaaccaacactaatcgaccgtaactgtgctactgaagggaactgcctttcccccttctgggggagacttaacagagcgtggaaggggggcattctctgtcaatgatgcactaacctcccaacctgatttccccgaatctgagggaaggtgagggagtgggaagggggatggagagctcgaggggacagtgtgtttgagctggagtgctgcgggcagcctttctcatggaatgacatgaatcaacttttttctttgtttcatcttttaagtgtacgtgcttgcctgttcgtgcatgtgttcataaactcaacactttaatcatggtttcatgagcattaaaaagcaaagggaaaaaggatgtgtaatggtgtacacagtctgtatattttaataatgcagagctatagtctcaattgttactttataaggtggttttattaacaaacccaaatcctggattttcctgtctttgctgtattttgaaaaacacgtgttgactccattgttttacatgtagcaaagtctgccatctgtgtctgctgtattataaacagataagcagcctacaagataactgtatttataaaccactcttcaacagctggctccagtgctggttttagaacaagaatgaagtcattttggagtctttcatgtctaaaagatttaagttaaaaacaaagtgttacttggaaggttagcttctatcattctggatagattacagatataataaccatgttgactatgggggagagacgctgcattccagaaacgtcttaacacttgagtgaatcttcaaaggaccctgacattaaatgctgaggctttaatacacacatattttatcccaagtttataatggtggtctgaacaaggcacctgtaaataaatcagcatttatgaccagaagaaaaataatctggtcttggactttttatttttatatggaaaagttttaaggacttgggccaactaagtctacccacacgaaaaaagaaatttgccttgtccctttgtgtacaaccatgcaaaactgtttgttggctcacagaagttctgacaataaaagatactagct

SEQ ID NO: 148 - DNA, 743 bp, Homo sapiens
  modified_base (531)..(736): n = a, c, g or t/u
tttggcatgccactaactattttttatttgcaactacatgatggcacacaattctcttaaacaacgacataaaatagatttccttgtatataaataacttacatacgctccataaagtaaattctcaaaggtgctagaacaaatcgtccacttctacagtgttctcgtatccaacagagttgatgcacaatatataaatactcaagtccaatattaaaaacttaggcacttgactaactttaataaaatttctcaaactatatcaatatctaaagggcatatattttttaagaaagattattctcaataacttctataaaaataagtttgatggtttggcccatctaacttcactactattagtaagaacttttaacttttaatgtgtagtaaggtttattctacctttttctcaacatgacaccaacacaatcaaaaacgaagttagtgaggtgctaacatgtgaggattaatccagtgattccggtcacaatgcattccaggaggaggtacccatgtcactggaattgngcgatatggtttattttttcttccctgatttggataaccaaatggaacaggaggaggatagtgattctgatggccattccctcgatacattcctggcttttttctgggcaagggtgcccacatngnnagagtgnanatatnnagtctgaaatctggtacacaggacttgcngctgcagtcaccgaactgggttcactttcatttnctttact

SEQ ID NO: 149 - DNA, 6629 bp, Homo sapiens
tggaatttgatccggaagaattttactacctattggaagcagcagaaggccatgccaaagaaggacagggtattaaaaccgacattcccaggtacatcattagccaactgggactcaataaggatcccttggaagaaatggctcatttgggaaactacgatagtgggacagcagaaacaccagaaacagatgaatcagtgagtagctctaatgcctccctgaaacttcgaaggaaacctcgggaaagtgattttgaaacgattaaattgattagcaatggagcctatggggcagtctactttgttcggcataaagaatcccggcagaggtttgccatgaagaagattaataaacagaacctcatccttcgaaaccagatccagcaggcctttgtggagcgggatatcctgacttttgcagaaaacccctttgttgtcagcatgtattgctcctttgaaacaaggcgccacttgtgcatggtcatggaatatgtggaagggggagactgtgctactttaatgaaaaacatgggtcctctccctgttgatatggccagaatgtactttgctgagacggtcttggccttggaatatttacataattatggaattgtacacagggatttgaaaccagacaacttgttggttacctccatggggcacataaagctgacagattttggattatctaaggtgggactaatgagcatgactaccaacctttacgagggtcatattgagaaggatgctagagagttcctggataaacaggtctgtggcacacctgaatacattgcaccagaagtgattctgaggcagggttatggaaagccggtggactggtgggccatggggattatcctctatgaatttctggttggatgcgtgccattctttggggatactccagaggagctatttggacaagtcatcagtgatgagatcaactggcctgagaaggatgaggcacccccacctgatgcccaggatctgattaccttactcctcaggcagaatcccctggagaggctgggaacaggtggtgcatatgaagtcaaacagcatcgattcttccgttctttagactggaacagtttgctgagacagaaggcagaatttattccccaactggaatctgaggatgacacaagttattttgatactcggtctgagaagtatcatcatatggaaacggaggaagaagatgacacaaatgatgaagactttaatgtggaaataaggcagttttcttcatgttcacacaggttttcaaaagttttcagcagtatagatcgaatcactcagaattcagcagaagagaaggaagactctgtggacaaaaccaaaagcaccaccttgccatccacagaaacactgagctggagttcagaatattctgaaatgcaacagctatcaacatccaactcttcagatactgaaagcaacagacataaactcagttctggcctacttcccaaactggctatttcaacagagggagagcaagatgaagctgcctcctgccctggagacccccatgaggagccaggaaagccagcccttcctcctgaagagtgtgcccaggaggagcctgaggtcaccaccccagccagcaccatcagcagctccaccctgtcagttggcagtttttcagagcacttggatcagataaatggacgaagcgagtgtgtggacagtacagataattcctcaaagccatccagtgaacccgcttctcacatggctcggcagcgattagaaagcacagaaaaaaagaaaatctcggggaaagtcacaaagtccctctctgccagtgctctttccctcatgatcccaggagatatgtttgctgtttcccctctgggaagtccaatgtctccccattccctgtcctcggacccttcttcttcacgagattcctctcccagccgagattcctcagcagcttctgccagtccacatcagccgattgtgatccacagttcggggaagaactacggctttaccatccgagccatccgggtgtatgtgggagacagtgacatctatacagtgcaccatatcgtctggaatgtagaagaaggaagtccggcatgccaggcaggactgaaggctggagatcttatcactcacatcaatggagaaccagtgcatggacttgtccacacagaagttatagaactcctactgaagagtgggaataaggtgtcaatcactactaccccatttgaaaacacatcaatcaaaactggaccagccaggagaaacagctataagagccggatggtgaggcggagcaagaaatccaagaagaaagaaagtctcgaaaggaggagatctcttttcaaaaagctagccaagcagccttctcctttactccacaccagccgaagtttctcctgcttgaacagatccctgtcatcgggtgagagcctcccaggttcccccactcatagcttgtctccccggtctccaacaccaagctaccgctccacccctgacttcccatctggtactaattcctcccagagcagctcccctagttctagtgcccccaattccccagcagggtccgggcacatccggcccagcactctccacggtcttgcacccaaactcggcgggcagcggtaccggtccggaaggcgaaagtccgccggcaacatcccactgtccccgctggcccggacgccctctccaaccccgcaacccacctccccgcagcggtcaccatcccctcttctgggacactcactgggcaattccaagatcgcgcaagcctttcccagcaagatgcactccccgcccaccatcgtcagacacatcgtgaggcccaagagtgcggagccccccaggtccccgctgctcaagcgcgtgcagtccgaggagaagctgtcgccctcttacggcagtgacaagaagcacctgtgctcccgcaagcacagcctggaggtgacccaagaggaggtgcagcgggagcagtcccagcgggaggcgccgctgcagagcctggatgagaacgtgtgcgacgtgccgccgctcagccgcgcccggccagtggagcaaggctgcctgaaacgcccagtctcccggaaggtgggccgccaggagtctgtggacgacctggaccgcgacaagctgaaggccaaggtggtggtgaagaaagcagacggcttcccagagaaacaggaatcccaccagaaatcccatggacccgggagtgatttggaaaactttgctctgtttaagctggaagagagagagaagaaagtctatccgaaggctgtggaaaggtcaagtacttttgaaaacaaagcgtctatgcaggaggcgccaccgctgggcagcctgctgaaggatgctcttcacaagcaggccagcgtgcgcgccagcgagggtgcgatgtcggatggcccggtgcctgcggagcaccgccagggtggcggggacttcagacgggcccccgctcctggcaccctccaggatggtctctgccactccctcgacaggggcatctctgggaagggggaaggcacggagaagtcctcccaggccaaggagcttctccgatgtgaaaagttagacagcaagctggccaacatcgattacctccgaaagaaaatgtcacttgaggacaaagaggacaacctctgccctgtgctgaagcccaagatgacagctggctcccacgaatgcctgccagggaacccagtccgacccacgggtgggcagcaggagcccccgccggcttctgagagccgagcttttgtcagcagcacccatgcagctcagatgagtgccgtctcttttgttcccctcaaggccttaacaggccgggtggacagtggaacggagaagcctggcttggttgctcctgagtcccctgttaggaagagcccctccgagtataagctggaaggtaggtctgtctcatgcctggagccgatcgagggcactctggacattgctctcctgtccggacctcaggcctccaagacagaactgccttccccagagtctgcacagagccccagcccaagtggtgacgtgagggcctctgtgccaccagttctccccagcagcagtgggaaaaagaacgataccaccagtgcaagagagctttctccttccagcttaaagatgaataaatcctacctgctggagccttggttcctgccccccagccgaggtctccagaattcaccagcagtttccctgcctgacccagagttcaagagggacaggaaaggtccccatcctactgccaggagccctggaacagtcatggaaagcaatccccaacagagagagggcagctcccctaaacaccaagaccacaccactgaccccaagcttctgacctgcctggggcagaacctccacagccctgacctggccaggccacgctgcccgctcccacctgaagcttccccctcaagggagaagccaggcctgagggaatcgtctgaaagaggccctcccacagccagaagcgagcgctctgctgcgagggctgacacatgcagagagccctccatggaactgtgctttccagaaactgcgaaaaccagtgacaactccaaaaatctcctctctgtgggaaggacccacccagatttctatacacagacccaggccatggagaaagcatgggcgccgggtgggaaaacgaaccacaaagatggcccaggtgaggcgaggcccccgcccagagacaactcctctctgcactcagctggaattccctgtgagaaggagctgggcaaggtgaggcgtggcgtggaacccaagcccgaagcgcttcttgccaggcggtctctgcagccacctggaattgagagtgagaagagtgaaaagctctccagtttcccatctttgcagaaagatggtgccaaggaacctgaaaggaaggagcagcctctacaaaggcatcccagcagcatccctccgccccctctgacggccaaagacctgtccagcccggctgccaggcagcattgcagttccccaagccacgcttctggcagagagccgggggccaagcccagcactgcagagcccagctcgagcccccaggaccctcccaagcctgttgctgcgcacagtgaaagcagcagccacaagccccggcctggccctgacccgggccctccaaagactaagcaccccgaccggtccctctcctctcagaaaccaagtgtcggggccacaaagggcaaagagcctgccactcagtccctcggtggctctagcagagaggggaagggccacagtaagagtgggccggatgtgtttcctgctaccccaggctcccagaacaaagccagcgatgggattggccagggagaaggtgggccctctgtcccactgcacactgacagggctcctctagacgccaagccacaacccaccagtggtgggcggcccctggaggtgctggagaagcctgtgcatttgccaaggccgggacacccagggcctagtgagccagcggaccagaaactgtccgctgttggtgaaaagcaaaccctgtctccaaagcaccccaaaccatccactgtgaaagattgccccaccctgtgcaaacagacagacaacagacagacagacaaaagcccgagtcagccggccgccaacaccgacagaagggcggaagggaagaaatgcactgaagcactttatgctccagcagagggcgacaagctcgaggccggcctttcctttgtgcatagcgagaaccggttgaaaggcgcggagcggccagccgcgggggtggggaagggcttccctgaggccagagggaaagggcccggtccccagaagccaccgacggaggcagacaagcccaatggcatgaaacggtccccctcagccactgggcagagttctttccgatccacggccctcccggaaaagtctctgagctgctcctccagcttccctgaaaccagggccggagttagagaggcctctgcagccagcagcgacacctcttctgccaaggccgccgggggcatgctggagcttccagcccccagcaacagggaccataggaaggctcagcctgccggggagggccgaacccacatgacaaagagtgactccctgccctccttccgggtctccaccctgcctctggagtcacaccaccccgacccaaacaccatgggcggggccagccaccgggacagggctctctcggtgactgccaccgtaggggaaaccaaagggaaggaccctgccccagcccagcctcccccagctaggaaacagaacgtgggcagagacgtgaccaagccatccccagccccaaacactgaccgccccatctctctttctaatgagaaggactttgtggtacggcagaggcgggggaaagagagtttgcgtagcagccctcacaaaaaggccttgtaacggggagggcccaggggcaggactgtggagacccgtcctgaacgggcgactgtgtcttgactacctttcaaaaccagcactgtgtgggaatgtccgccaggcagagctcggagcctcattgagacaggggagagagaaagacaaagaggggaccttcttccagatgccttcccagttgtaaccggtaaaactgttaccagatagtgtttgtac

SEQ ID NO: 150 - DNA, 2008 bp, Homo sapiens
atcagttctcgcccgtctgggcgtgggcgtggccggcgtggctgctcgggaccacccgaacccgcggccatggccccggccgccgccagccccccggaggtgatccgcgcggcgcagaaggacgagtactaccgcggtgggctgcggagcgcggcgggcggcgccctgcacagcctggcgggtgcgaggaagtggctggagtggaggaaggaggttgagctgctctcagatgtggcctactttggcctcaccacacttgcaggctaccagaccctgggggaggagtacgtcagcatcatccaggtggacccatcgcggatacatgtgccctcctcgctgcgccgtggcgtgctggtgacgctgcatgccgtcctgccctacctgctggacaaggccctgctccccctggagcaggagctgcaggctgaccccgacagtgggcgacccttgcaggggagcctggggccaggtgggcgtggctgctcaggggcgcggcgctggatgcgtcaccacacggccaccctgactgagcagcagaggagggcgctgctgcgggcggtcttcgtcctcagacagggcctcgcctgcctccagcggctacatgttgcctggttttacatccacggtgtcttctaccacctggccaagaggctcacggggatcacgtacctccgtgtccgcagcctgcccggagaggacctgagggcccgtgttagctacaggctgctgggggtcatctcactgctgcacctggtgctgtccatggggctgcagctgtacggtttcaggcagcggcagcgagccaggaaggagtggaggctgcaccgcggcctgtctcaccgcagggcctccttggaggagagagccgtttccagaaaccccctgtgcaccctgtgcctggaggagcgcaggcacccaacagccacgccctgcggccacctgttctgctgggagtgcatcaccgcgtggtgcagcagcaaggcggagtgtcccctctgccgggagaagttccctccccagaagctcatctaccttcggcactaccgctgagccggcgcccgggtgggcctggacacagatgacctctacgggagtctgaacgccaagatttagtctcaggattaaccttgcttgcacagaagttagaacactctcagttttttgtcatgtaagatactaacctagccaccctgggagagaacagaaagctgtccctggctgcgctttctcagccctgggaggggcgcctgaacccagaacatttccctaaccccaacctggtaggactcagccacttcttcaggaatttcacttatttggacgggattttaggtttccctcccttccccaaaccatacagttgagaagtaattcagaagtaggccagaagacactttattcgtttatattgtgagaaaacagccccatcaggcttgtgttaaggcaatggactgaatgagtgcgtgctgggtggggtggggcacggaggctggcgggttgcttcagccagtgcagtgagaacagcagccccacggccccatgggaggcggcgctgctctccccgagggcggctgggcagagcacatcccccaggacttgatgaccacacggggcagagagaaaccaaccaaggccagcacctccgtcggaagcatttggcacacacaccttcaatacacgtcaaggtcgcttccagttttagaaaacagaaatctgcatctcagcctgagacgcacagagaggtctcttcctgacccagacgcactcacgagccaggtcctgggggtatgggggctgccaggggcgcccgagccctctcctggggggcctgctgggcaggcgacctgctgacccacggtcactgctgtgttcagcccctcagctcggccccagcctatttcccgcctccatttgatgtttccaggttttcaaaactgcatttaacctgcgccagagagttcaccgtaggcatctttaataaactaactccagcaaaaaaaaaaaaaaa

SEQ ID NO: 151 - DNA, 1831 bp, Homo sapiens
cggacggtcttgggtcgcctgctgcctggcttgcctggtcggcggcgggtgccccgcgcgcacgcgcaaagcccgccgcgttcccagaccccaggccgcgctctgtgggcctctgagggcggcatgcgggactacgacgaggtgaccgccttcctgggcgagtgggggcccttccagcgcctcatcttcttcctgctcagcgccagcatcatccccaatggcttcaccggcctgtcctccgtgttcctgatagcgaccccggagcaccgctgccgggtgccggacgccgcgaacctgagcagcgcctggcgcaaccacactgtcccactgcggctgcgggacggccgcgaggtgccccacagctgccgccgctaccggctcgccaccatcgccaacttctcggcgctcgggctggagccggggcgcgacgtggacctggggcagctggagcaggagagctgtctggatggctgggagttcagtcaggacgtctacctgtccaccattgtgaccgagtggaacctggtgtgtgaggacgactggaaggccccactcacaatctccttgttcttcgtgggtgtgctgttgggctccttcatttcagggcagctgtcagacaggtttggccggaagaatgtgctgttcgtgaccatgggcatgcagacaggcttcagcttcctgcagatcttctcgaagaattttgagatgtttgtcgtgctgtttgtccttgtaggcatgggccagatctccaactatgtggcagcatttgtcctggggacagaaattcttggcaagtcagttcgtataatattctctacgttaggagtgtgcatattttatgcatttggctacatggtgctgccactgtttgcttacttcatccgagactggcggatgctgctggtggcgctgacgatgccgggggtgctgtgcgtggcactctggtggttcatccctgagtccccccgatggctcatctctcagggacgatttgaagaggcagaggtgatcatccgcaaggctgccaaagccaatgggattgttgtgccttccactatctttgacccgagtgagttacaagacctaagttccaagaagcagcagtcccacaacattctggatctgcttcgaacctggaatatccggatggtcaccatcatgtccataatgctgtggatgaccatatcagtgggctattttgggctttcgcttgatactcctaacttgcatggggacatctttgtgaactgcttcctttcagcgatggttgaagtcccagcatatgtgttggcctggctgctgctgcaatatttgccccggcgctattccatggccactgccctcttcctgggtggcagtgtccttctcttcatgcagctggtacccccagacttgtattatttggctacagtcctggtgatggtgggcaagtttggagtcacggctgccttttccatggtctacgtgtacacagccgagctgtatcccacagtggtgagaaacatgggtgtgggagtcagctccacagcatcccgcctgggcagcatcctgtctccctacttcgtttaccttggtgcctacgaccgcttcctgccctacattctcatgggaagtctgaccatcctgacagccatcctcaccttgtttctcccagagagcttcggtaccccactcccagacaccattgaccagatgctaagagtcaaaggaatgaaacacagaaaaactccaagtcacacaaggatgttaaaagatggtcaagaaaggcccacaatccttaaaagcacagccttctaacatcgcttccagtaagggagaaactgaagaggaa

SEQ ID NO: 152 - DNA, 1118 bp, Homo sapiens
gcggggaggcggcggctccagggacctggcggccgccgatcggggctgcgaggccccatggcgccgcccccagccccgctcctggcgccgaggcccggggagacccggcctggttgcaggaagcccgggactgtgagcttcgcggacgtggccgtgtacttctccccggaggagtggggctgtctgcggcccgcgcagagggctctgtaccgggacgtgatgcaggagacctacggccacctgggcgcgctcggattcccaggccccaaaccagccctcatctcttggatggaacaggagagtgaggcttggagccccgccgcccaggatcctgagaagggggaaagactgggaggagctcggagaggagatgtcccaaacaggaaggaagaggaaccggaggaagtcccaagagccaaagggcctagaaaggctcctgtgaaggagagtcctgaagtgctggtggaacgcaaccctgacccagctattagcgtggccccggcacgggcacagccacccaaaaatgctgcctgggacccgaccacaggagcacagcccccggcacccatacccagcatggatgctcaggccggccagcggcgccacgtgtgcacggactgcggccgccgcttcacctacccctcactgctggtcagccacaggcgcatgcactcgggggagcggcctttcccctgccccgagtgtggcatgcgcttcaagaggaagttcgcagtggaagcgcaccagtggatccaccgctcctgctccggggggcggcggggccggaggcctgggatccgggctgtgcctcgggcccccgtccgaggtgaccgggacccgcctgtgctcttccggcactacccagacatcttcgaggagtgcggctgagcggcaccgcaggctggagttgagcctgaccttggcacgaaggactgacggatccctgaggtgggccactgagtcggggactccggaactgaaattcatgccctgggctttcctcaaggatccctcaagtttccaacttgtaaaaagaaaagtgcctgtaaagattcgaatagattagacttgccacccatctccccagtcttttgtttaacaaaaaaaaaaaaaaaaaa

SEQ ID NO: 153 - DNA, 1972 bp, Homo sapiens
cgcggccggcagcgccagcgctggaatcgcccccgcgcctgggagtggcctcgcgaggcgggcgcgcgccccggggccgaggaatccgcctgcccgcccaggcgtcggccacgagagagcgggagcctcgctggtccccatttcagaggtggaggaagacctgggccgtgctctacccggccagtccccacggcgtagcgcggctcgagttctttgaccataaggggtcgagctctgggggtggccgagggagctcgcgccgcctggactgcaaagtgatccgtctggctgagtgtgtgagtgtggcccccgtcaccgtggagaccccccctgagcccggcgccactgccttccgcctggacactgctcagcgctcgcacctgctggcggccgacgcgccgtccagtgcagcctgggtgcagacgctgtgccgaaacgcctttccgaaaggcagctggactctggcgcctaccgataacccacctaagctttctgccctggagatgctggagaactccttgtacagccctacctgggaaggatcccaattctgggtaacggtgcagaggactgaggccgccgagcgctgtggcctgcatggctcctacgtgctgagggtggaggctgaaaggctgactctcctgaccgtgggggcccagagtcagatactggagccactcctgtcctggccctacactctgttgcgtcgctatggccgggacaaggtcatgttctctttcgaggccggccgccgctgcccctcaggccctggaaccttcaccttccagacggcacagggaaatgacatcttccaggcagttgagactgccatccaccggcagaaggcccagggaaaggccggacaggggcacgatgttctcagagctgactcccatgaaggggaggtggcagaggggaagttgccttccccacctggcccccaagagctcctcgacagtcccccagccctgtatgctgagcccttagactccctgcgcattgctccatgcccttcccaggactccctatactcagaccccttggacagcacgtctgctcaggcaggagagggagtacaacggaagaaacctctctattgggacttgtatgagcatgcgcagcagcagttgctgaaggccaagctgacagaccccaaagaggatcccatctatgatgaacctgagggcctggccccagtccctccccagggcctttatgatctgcctcgggagcccaaggatgcatggtggtgccaagctcgggtgaaggaggagggctatgagctcccctacaaccctgccactgatgactacgctgtgccaccccctcggagcacaaagcccctccttgctcccaagccccagggcccagccttccctgaacctggtactgcaactggcagtggcatcaaaagccacaactcagccctgtacagccaggtccagaagagcggggcctcagggagctgggactgtgggctctctagagtagggactgacaagactggggtcaagtcagagggctctacctgagaaggacggcaaggctgaggtggctaagggggaccatggggaggtggcactagggatcaaagaagatggttagaaccagcagaagccagagggtgggaggggccatgctgtgtgagaccaggggaccagagggatgggagagtcaagggaaggacaatcccaggaagtcctaagaagtggggcagatggcagggctgaggatgggctctgcatcccccaaagccatcccttccctacttccccaaatgaagggacggctgtgggaccaggtctgtggaaagtggtgcatggtcagaatgggtgcagtttgaggggcctgtgtggaggcctcagggagatgttggactgtgcctggatccttactcctgcattgttctttgccagagacctatttaaaaattttaaaattctcattaaagtcaaaaaaaaaaaaaaaaaaa

SEQ ID NO: 154 - DNA, 2004 bp, Homo sapiens
cgtgatccagtctgcgctggggagcagtgagatcgatagcaagaccgttgaaaactgtgtgtgcattttaaggaacctctcgtaccggctggcggcagaaacgtctcagggacagcacatgggcacggacgagctggacgggctactctgtggcgaggccaatggcaaggatgctgagagctctgggtgctggggcaagaagaagaagaaaaagaaatcccaagatcagtgggatggagtaggacctcttccagactgtgctgaaccaccaaaagggatccagatgctgtggcacccatcaatagtcaaaccctacctcacactgctctctgagtgctcaaatccagacacgctggaaggggcggcaggcgccctgcagaacttggctgcagggagctggaagtggtcagtatatatccgagccgctgtccgaaaagagaaaggcctgcccatcctcgtggagctgctccgaatagacaatgaccgtgtggtgtgcgcggtggtccactgcgctgcggaacatggccttggacgtcagaaataaggagctcatcggcaaatacgccatgcgagacctagtccacaggcttccaggagggaacaacagcaacaacactgcaagcaaggccatgtcggatgacacagtgacagctgtctgctgcacactgcacgaagtgattaccaagaacatggagaacgccaaggccttacgggatgccggtggcatcgagaagttggtcggcatctccaaaagcaaaggagataaacactctccaaaagtggtcaaggctgcatctcaggtcctcaacagcatgtggcagtaccgagatctgaggagtctctacaaaaaggatggatggtcacaataccactttgtagcctcgtcttcaaccatcgagagggaccggcaaaggccctactcctcctcccgcacgccctccatctcccctgtgcgcgtgtctcccaacaaccgctcagcaagtgccccagcttcacctcgggaaatgatcagcctcaaagaaaggaaaacagactacgagtgcaccggcagcaacgccacctaccacggagctaaaggcgaacacacttccaggaaagatgccatgacagctcaaaacactggaatttcaactttgtataggaattcttatggtgcgcccgctgaagacatcaaacacaaccaggtttcagcacagccagtcccacaggagcccagcagaaaagattacgagacctaccagccatttcagaattccacaagaaattacgatgagtccttcttcgaggaccaggtccaccatcgccctcccgccagcgagtacaccatgcacctgggtctcaagtccaccggcaactacgttgacttctactcagctgcccgtccctacagtgaactgaactatgaaacgagccactacccggcctcccccgactcctgggtgtgaggagcagggcacaggcgctccgggaacagtgcatgtgcatgcataccacaagacatttctttctgttttgtttttttctcctgcaaatttagtttgttaaagcctgttccataggaaggctgtgataaccagtaaggaaatattaagagctattttagaaagctaaatgaatcgcaagttaacttggaaatcagtagaaagctaaagtgatcctaaatatgacagtgggcagcacctttctagcgtgagctgtagagtaacgagaagtgctttatactgaacgtggttgatgggaggagagacgaggcattcgggccggtggggcgtaagggttatcgttaagcacaagacacagaatagtttacacactgtgtgggggacggcttctcacgctttgtttactctcttcatccgttgtgactctaggcttcaggttgcattggggttcctctgtacagcaagatgtttcttgccttttgttaatgcattgttgtaaagtatttgatgtacattacagattaaagaagaaaaaaaaaaaaaaaaaaaaaaaaaaaaaaaa

SEQ ID NO: 155 - DNA, 2098 bp, Homo sapiens
cgggaagtcgctgaagacagagcgatggtagttctggaggcctcgctccggggccgacccgaggccacagtgcctccgcggtagaccggacttgggtgacgggctccgggctcccgagggatggaagggtctaagacgtccaacaacagcaccatgcaggtgagcttcgtgtgccagcgctgcagccagcccctgaaactggacacgagtttcaagatcctggaccgtgtcaccatccaggaactcacagctccattacttaccacagcccaggcgaaaccaggagagacccaggaggaagagactaactcaggagaggagccatttattgaaactcctcgccaggatggtgtctctcgcagattcatccccccagccaggatgatgtccacagaaagtgccaacagcttcactctgattggggaggtatctgatggcggcaccatggagaacctcagccgaagactgaaggtcactggggacctttttgacatcatgtcgggccagacagatgtggatcacccactctgtgaggaatgcacagatactcttttagaccagctggacactcagctcaacgtcactgaaaatgagtgtcagaactacaaacgctgtttggagatcttagagcaaatgaatgaggatgacagtgaacagttacagatggagctaaaggagctggcactagaggaggagaggctgatccaggagctggaagacgtggaaaagaaccgcaagatagtggcagaaaatctcgagaaggtccaggctgaggctgagagactggatcaggaggaagctcagtatcagagagaatacagtgaatttaaacgacagcagctggagctggatgatgagctgaagagtgttgaaaaccagatgcgttatgcccagacgcagctggataagctgaagaaaaccaacgtctttaatgcaaccttccacatctggcacagtggacagtttggcacaatcaataacttcaggctgggtcgcctgcccagtgttcccgtggaatggaatgagattaatgctgcttggggccagactgtgttgctgctccatgctctggccaataagatgggtctgaaatttcagagataccgacttgttccttacggaaaccattcatatctggagtctctgacagacaaatctaaggagctgccgttatactgttctggggggttgcggtttttctgggacaacaagtttgaccatgcaatggtggctttcctggactgtgtgcagcagttcaaagaagaggttgagaaaggcgagacacgtttttgtcttccctacaggatggatgtggagaaaggcaagattgaagacacaggaggcagtggcggctcctattccatcaaaacccagtttaactctgaggagcagtggacaaaagctctcaagttcatgctgacgaatcttaagtggggtcttgcttgggtgtcctcacaattttataacaaatgacttttttccttagggggaggtttgccttaaaggctttttaattttgttttgtttgcaaacatgttttaaattaaattcgggtaatattaaacagtacatgtttacaataccaaaaaagaaaaaatccacaaaagccactttattttaaaatatcatgtgacagatactttccagagctacaacatgccatctatagttgccagccctggtcagttttgattcttaaccccatggactcctttccctttcttctctgaaaaaaactaatttaaatttgcttttcttttttttaactgagttgaattgagattgatgtgttttcactggatttttatctctctcaacttcctgcacttaacaatatgaaatagaaacttttgtctttactgagatgaggatatgtttgagatgcacagttgggataatgtgggaaaatgacatctaagctttacctggtcaccatgtgatgtgatcagatgcttgaaatttaacacttttcacttggttcttatactgaatgccgactctgctctgtgttagagatatgaaatggtgtttgatactgtttgagacattatggagagatttaattatttgtaataaaagatttgctgcagtctgaaaa

SEQ ID NO: 156 - DNA, 573 bp, Homo sapiens
ttttttttttaacttttgagatttccattttatttaatatatcagcctggcaattaatcatcacctttccaacacattcaagcagatgtttgttgttatatgtagccaggtgttagaccaggaagattggaccaaataatctagcataaagtagaagttgaaagcagaagttcaagggtttttgttgttgttgttttttggtaagtcacctcacagcttattagccagcctgtgtttgaaccaccatttgggtaccttctctgttttaataaggcctcatccctgcaccagcatcctaaccatttttctcaaatggagagacgggtgctataaacaacccaatttaggctagaaagggaaactaaatattttgtgtaacatccaaatactctctggttgccaattttggttctaaagaaatggacaaaatttctcccaacctcaggccttgcacagtggctcacacctataatccagagctttgggaggcaaggtagcagctcacttgaggtcaggagttcaagacagcctggccacatggtgaaactcattactaaaatacaaaatcagctg

SEQ ID NO: 157 - DNA, 577 bp, Homo sapiens
tcttttcactatcatagtcactctggtgaatccaagcataaacagacaaatccaactacaactcaacagggtgcagatggggagggcagggcaacatctatgtatatgttcagctgctccagcagaacagacagcatggcttccagctgggactgggggaaaagaaccatttccaagggggtgtgttcccctttgtcgggtgtggagggctgatactatgcatgtggagctgagcagcgggctgggctgtctgggaggttggcagctacaagctagggtgcaagtgggggacagcgggactgtgggcctgccctgggtgccttgcccttccatcctggtgccaccactgacaaccaagacacccagcctgctgctgtgggctcagcacaggaaggggccaggccttctcaggggaaagggctctctccatgtcaacaaggcagaaacacctagggtcacagctgagcagtgccctggctcacatctgtgacgggaggaggagacagggaaccgaatcagatcatgagattcgtggtgagggtcccagttggatgagtggaactgagagtgagaggct

SEQ ID NO: 158 - DNA, 653 bp, Homo sapiens; identical to SEQ ID NO: 78

SEQ ID NO: 159 - DNA, 553 bp, Homo sapiens
ttctgagtatttgctgtattttatttgttcacatttagcctatttgaggttaacactacttcatttgacagtttaaaaatcatcctgtaaatagaataaaaaacaacagcagcaatagctaaaaaaaggacacaatgtataataaaataaaggaatgtgttgaaagaaatattccaaagaagcaaaggaaatgagaccatgattatgaattcaacaatcagaagaaaaaatcgtccaacatctgtaaaaagcaaaatcataacagtaataaaaaagaagcaagaattcaaagtgcaggtgcgctagctttcatttccacatccattcaggaaatagagcatactattcttttatataaagtgacaagttctgttttaaaacattcagttacattatcttgcagattttttttcagtttacattatctctacattgatttgatggaaagatggtcatatgcgatatgtggtataaatttcttcaatctatggagaatacggaaatggtaaagttgactgttttacttatgtttttgcagtaagaagctaaacat

SEQ ID NO: 160 - DNA, 461 bp, Homo sapiens; identical to SEQ ID NO: 140

SEQ ID NO: 161 - DNA, 534 bp, Homo sapiens
  modified_base (441)..(525): n = a, c, g or t/u
agagctggcggccacactgaggcctgtctcgttgcgtttgtagtgctccccgaaggacaccagcccaatggagatggtctgcaggaatggccggatggcaggcgtgaactggaagcccaggcagcggccatagaagcatcccttatgcagcgtgacatactcccggaggaagtcggcggtgagcccctcgtcgccctcaaagaagagtacccccggccgattggtaaccagcaggcgctgggcgtagtagaccagagcgcggagctgggtgagggcagccaggtaggcctccagctcggccaggttgtggctggtgcgaagaagatgctggcggggttggaggccacatagccgggattgtgcaagaggtgcgccaggcagcagccgggctggtgcactagggctcgggtacccgtgggccgtgtctttggttcagtcaanagagtgcccacacccagcaggcggcccagggcccgctccagccccagcgcctggtccgtcaccgcaaaaacgcctgaaagcccntgtgccgtt

SEQ ID NO: 162 - DNA, 502 bp, Homo sapiens
tcagtttcaaaacaacctttattctgtttgaagatctaatacaatgcattaaagcaacttaaaacaagacatagctccattgaatctataacttgaacgaaatgtcaaggaggcacactacccccaccccccaccccagttgccttgtgaaggcaaagttacaactgaccgtgacatcctccctctcgtcaaaagaccaactttattttaacaatgtcatataaacagatttttaaaaacattgaacagattgtagctttaaaaaatacacaggtataaatgagtttttttttgttttgatttttttaaatacatatatatatgtgcatatatatacatatatgtatatacatatatatatacacatatatatatatatacacacacatatatatatatatatatatatatatatatacacacacacacacacacacacacacatatatatatatatatatatatatatagcagcatcctgggcagctaatgctatctcatg

SEQ ID NO: 163 - DNA, 777 bp, Homo sapiens
  modified_base (530)..(556): n = a, c, g or t/u
ttttttaaatattttattactagcccacccatcaatttggaaagatgaaatttgctcttactcccatcactgattttgaagtcccgagccaaagccgagtgacaaaagcaggttaagtgattaaccaattaaccgaactgcgaggagcagctgggggcagagggcgggggccgggtcattattctttttttttccacactctctcattctctcctctccacaattattgaccgccccaggggcctgatcacaaaccctgcttggccagggaggcagacacctcgtcagctagcgtggcgagctggggcgagtctaccatgtcgatgctgccggtggaggagacattgctgagatgccgtggagacgtgtccccagacaccactggcgacttgtacacgatctccgccccgtggtctgtcttggctttggcgttctcgcggaaggtcagcttgtgggtttcaatctttttatttcctccgccagggacgtgggtgatattgtccagggacccaatcttcgactggactctngccttgaagtcaagcttctcagattntactttcacctggccacctcctggtttatgaatgatgttgcctaatgagccacacttggaggtcaccttgctcaggtcaactggtttgtagactatttgcacctttcccgctccccgctgggtgctcagggtctaagtggagctgatcttggaattgaccttcttaaggtctggttgggccacggggctgtctgcaagcggctcttggccggaagacggcg

SEQ ID NO: 164 - DNA, 661 bp, Homo sapiens
tgctttttattcatttgtaattatcaataaaatgaaagaaagacctagcatttttaaaactccactgtaaaacataggttaccataaaaatgtatttaatgggttaatatttcaatatttattttttaacagaaaacactcatcacatgcaaaacctgtcacttcacatcttcaagtttcataagttgataatacctaatcaaaaagtacatgtgaaaagaaagctttttcatagttgaactttaagtcattcaaaatcattcaataaaatggatgtagtactggccaggtgcggtggttcacgcctgtaatcccggcactttaggaggctaaggcaggaacgaggtcaggagttcaagaccagcctgaccaacatggtgaaaccccatctctactaaaaatacaaaaattagccgggcgtggtggtgtgcacctgtaatcccagctactcaggaggctgaagcaggagaatcgcttgaacccaggaggcggaggttgcagtgagccgagatcgcatcactgtactccagtctgagtgacacagtgagactctgtcccccccgccccccgcaaaaaaaagatgtatgtagtgctgacaaaaaagtttcatatttggcatatttcttttaccctcccaaatattatcaaaaggtctgattct

SEQ ID NO: 165 - DNA, 2864 bp, Homo sapiens
tggcaatggaaatataattacactttttactctcagaatattgttcacattagacttcctgtttatcttttatattcttgcatttatataatgcctcatcctttcaaagttctttcacatattatatgatcttctttatgaaaaaaatagatgtttcattctgatatattcagtttcccactttaggcaaaagtagattaatagaatgacgaattcaaagtagatgaggaaaatcaggcacagagaagtaaaggtagggatagacccaaatttacacagcaagataatgacatctccagcctttaagttgatcatcaaaggctgggctggatttgtcttgctgtatgtgtcaggaaatttatacctattacattttccattttctcaaaatttaagtcacatgactaatatttagctgcaactttcctcataacaaatagtgtcatgaagaatgttgtagtgtgaagtttgtacatttcagggtcagatatacaatatgaactcttaatctacaggaatgagaatggaggatcattgaaggccatgatataaacaaatttgcatgttgaagcctgtataaaacatggtacagtgagtgaatatacccccatccccaagaacactttatacatattaaatggatatatgattactgtgcaaaaattcattctggaaatgaacatatatttgagcactaatatgtaatgtacacctgccctaaggagaaaataaattataaaactttttacattcaaaattactttcccaagcatgtcttagaataatctatgtgttgatgcatgtaaattgtactttaggtaggcaaagaaatctggttatttatgtaaaaactagtctaataaagttagttagtggctttatcactttaaatctttagtgtccaaaagtggtgtttaaagtaatagcacatcagaagaccttgtctggacaaaactagttcactcactgcttctgcacctgcagttgctccctttagggttataaaataatgacccaaatgttacatgtgttgatattataacttgtcagttactgatgtctgtggtatcctaccctcatctctgaaagggataatactgaataattattagaaaactataaaacttcacactttgtaccattaaaacctaaaattttaatcttgtccttttttactatggatcagtcggcactcgggaacagcagcaaggaaaaaaagcaaatttcattcacatgttctgtgtccatacctcttctctacctaattgttcatttaaatttcagccttattccttgataagggattttaccacatgaagtcatccagtgaccctagctcttattgtgaagttagtggagtatacttagaaatgttacaactttaaaatgttacaaaacattcattaaagctcatatttaaagtagagcatctagtttgagaaatagaaatcaattattaaagatgtcttttttctacccatttaactagttaaaaccatgacatgtaaatgtagaagtagaataatcacagaattccctaaaatatttctgtttactaacatatattgaccaagtacatcaagcaggagagatcttccttcattctgttatagtccacatcattctaattttgctcagttgttattaagagcatattcctaaaccatacacttttgtttcaataaagttttattttgttgagatgaataaaataacaaagttataagctgcataagacaaaagttcaattgttcaaaaaaaatttactgggatagctttctattacaggtattgttagattatattgtgctgataagattactttctaaaaaatttgtacttttctgtaaattaaaagaatatggagtcataaaatggcaagtgttttaggattagcctaaaattggacattgtcattgatttcaaagaaggtatgaactagcagtcttacagcctaattcttctttggactggtccttggcagcagttccttttcagactcgataaacagaattcagatgatgtaagtcaaaacagaactttacaaagccaagcgtattatcttttgcattaacctatttttttccatcatacatgctactagtatgtgcattagcatgatattctcatatacattgcattaaaattaaaaggtggcagctcagggtgagctcttctgttgctcatttgttcctaaatttttaagggctttttctcagtcaatagtttgtacaaactggttagtttaacttcattacccatttcattaaagttgatgggtcgtgtgatgagatgcatttaaggccgatagtgatagatgtttttttcatttcttgaacacaggctttgtctgaatgatgttcttttatctcttgaacacaagctttgaatgataactacaggttttaagtgctgttacattaataccataatgtgatgtgttagaaacaaagggatatttcaaaggtagatatttgaaaattctctagtctcaatatgtatgtgtattgaatatactctaaaaataaatgtgcaatttgctagtaggacaatgcagtgactgactagcattaggtatgtttcttttatatcctagctatgtcccactttcttctaagtgcaatcctttcatgttcacttgctgttttaccccatctactctaacttcatttggaaggcttgtctagagtatagcatgtatttttacctttgcagtgaattgcatgtgctaattgtaaccacagctatttttatgttgacataactccaaatgttatattaaatgttctattatatattagctctaatcccttaagtaaattttaagaaataaatacttgttcaaatttcaaaaaaaaaaaaaa

SEQ ID NO: 166 - DNA, 1248 bp, Homo sapiens
ctgcgagcccagccgcagcagccgggcaccaacgcttgagtgcacgctcggcgcccccgaggagagccacggcgagcccccaaagcccgcacgatgcaggccactgccgattccaccaagatggactgtgtgtggagcaactggaaaagtcaggctattgacctgttgtattggcgggacatcaagcagacgggcatcgtgtttgggagtttcctgctgctgctcttctccctgacccagttcagcgtggtgagcgtcgtggcctacctggccctggccgcactctcagccaccatcagtttccgcatctacaagtctgttttacaagcagtgcagaaaaccgacgaaggccaccctttcaaggcctacttggagcttgagatcaccctttctcaggagcagattcagaagtacacggactgcctgcagttctacgtgaacagcacacttaaggaactgaggaggctcttccttgtccaggacctggtggattccttaaaatttgcagtcctgatgtggctcctgacctacgttggcgctctcttcaatggcctgaccctgctgctcatggctgtggtttcaatgtttactctacctgtagtgtatgttaagcaccaggcacagattgaccaatatctgggacttgtgaggactcacataaatgctgttgtggcaaagattcaggctaaaatcccaggcgctaagaggcacgctgagtaaactgatttcccaccggggactggacacaaacaggaatgtctggagtggtaacagctctcttcttactcattactgcaaattgattgtctttcccccctccctccagtaccataatcttagagacaaaccttaaaacagctgtttttaggctgttccttgtactcttaggatatttgagtcacttgtgtcaaccactaaagtatagagaaaagtgtattagatgtggtttttaattttgtgttgctaaaaaaagtgcatgatggtgagagcccaagttatctttccctcttcggtgttcttcttctcttctctgcaatgcttctgtagcttctaatgttccccgtggctaggcctttcctgccgagtgctctgatgcaatagtggaaatcgcttatatgtccttgggttgctggttggattaatctttaataacaatatatagaattgtagactgatgttttagcatttttccaacacacacaacgtaaaaataaaagcagtcgaccgcaaaaaaaaaaaaaaaaaaaa

SEQ ID NO: 167 - DNA, 996 bp, Homo sapiens
gtccagcccggctgccaggcagcattgcagttccccaagccacgcttctggcagagagccgggggccaagcccagcactgcagagcccagctcgagcccccaggaccctcccaagcctgttgctgcgcacagtgaaagcagcagccacaaagggcaaagagcctgccaccgacggaggcagacaagcccaatggcatgaaacggtccccctcagccactgggcagagttctttccgatccacggccctcccggaaaagtctctgagctgctcctccagcttccctgaaaccagggccggagttagagaggcctctgcagccagcagcgacacctcttctgccaaggccgccgggggcatgctggagcttccagcccccagcaacagggaccataggaaggctcagcctgccggggagggccgaacccacatgacaaagagtgactccctgccctccttccgggtctccaccctgcctctggagtcacaccaccccgacccaaacaccatgggcggggccagccaccgggacagggctctctcggtgactgccaccgtaggggaaaccaaagggaaggaccctgccccagcccagcctcccccagctaggaaacagaacgtgggcagagacgtgaccaagccatccccagccccaaacactgaccgccccatctctctttctaatgagaaggactttgtggtacggcggaggcgggggaaagagagtttgcgtagcagccctcacaaaaaggccttgtaacggggagggcccaggggcaggactgtggagacccgtcctgaacgggcgactgtgtcttgactacctttcaaaaccagcactgtgtgggaatgtccgccaggcagagctcggagcctcattgagacaggggagagagaaagacaaagaggggaccttcttccagatgccttcccagttgtaaccggtaaaactgttaccagatagtgtttgtacaaaaaaaaaaaaaaaaaaaaaaaa

SEQ ID NO: 168 - DNA, 581 bp, Homo sapiens
tcttttttgaacaggtccaatgatttcagatcttctggaaaaggctttttgtcatttgcttctatttccacaacacttacatcagtgaaattgccatctgaatacatttgatcttttgaattaaaattgtgccttggaggagtgtgaggtgaccactgggcaatatgactctttgaaggatctggaacattaggccagatgtgttttttaattaggtctcgcttattaaagcagaacagcactcccagaagagttgtcaataggaatgctaatcaaacaggcacgactatggcttcaatttctccttgagcaaactttggggtagtaaaagtgaattctggaccatccttcccaccttcatctgtgtatgctgccattcgtaccatgtacaatgtgtcactagtcaaagaggacaatgtatattctgtgtgggaagaatccacattcacagcagtttcatttccaatgatggttctataaaatatattataatttctgataaactcattctgaacatcaacatgaagttgcatccactctaagacagcttctgctttccctacatttattgaccgaacaga

SEQ ID NO: 169 - DNA, 926 bp, Homo sapiens
  modified_base (645): n = a, c,  g or t/u
cggtttgggatatgacctttattgaacttatccaccagagtggaaataatgtctgtacaaaaccaaatgtttgttactataacttctgcatcacaattaaaatccaaacagttttttaaaaacagtcaactcaatcaaaacccactacttcagaatcaatagcttctttgaagccacagtaacacttaaatatggttaagactcgaatgcagaaatttggttggttggaaagctaattaaacttccaacttgctcaaatagaattacaaaaaggcaaaattgtgtttttcacagagatacagtccactggaatcaccaacactggacagctgttagagtatttagagtcctgagataacaaggaatccaggcatcctttagacagtcttctgttgtcctttcttcccaatcagagatttgtggatgtgtggaatgacaccaccaccagcaattgtagccttgatgagagaatcccaatcttcatctccacgaatagcaagttgcaagtgacgaggggtaatacgctttacctttaagtcttttgatgcatttcctgccagttcaagtacctttgcggtgaggtacttcaggatggctgcgctgtacacagcggcagtcgcgcccacacgttcatggactggccgncctagatttttaggtgtccatgaattacgggccacctgggaaccttgaagccgggcttctctgggaaccggaaaacccgccttttggctttgccccttctggccgttttttttgaaacccggttatatagtaagtaaggcgggccgttttttaaggattccaagctttacgttcaccgtgcattcgcagcgcaatagattttttaataggggccacttaaatttcaatctcctgggcccgccgttttacacaacgctcgaattgggaaaaaccctgggctt

SEQ ID NO: 170 - DNA, 806 bp, Homo sapiens
ggcccagagggtgtctttgaaaccctgttcctaacccttgtgtgtgtgtttcctgtctgaggacagtgggtgtgtactggcctcccgggagccactgtgaccaggcctttgagctcttgtcatctgtggagagaatcatgcaaattttaaaagttcttccaagagacttccatgtcctggttattaacaaaaaaggaaaaatgtaataattgatatgatttgtaaaagtatttttcttgaaataatctaaagtttaaaacattatattaaaaaaaaagtcgtgtggtgggaatgtgaaagcagagaaataacttgtaaatggataatttgttctctgtaccaccagttgaagggggggttgactttcgcaatgtataggataaaaaatctgatatatcaaaccattgtatctaatgtgtacagtgtacaattgatttaaaaatattgcagtgatattttttcttaatcagaaaggaaaattctcaaggcctttgaagagcataagaagatgaagatggtaacacttgtataaacattatcttggtgagaagacaaatggtaaagtagatattgtaatctttttaccacttggggttgcttttttcccggaattcatcagaacttttgaattttttttttcaaatgggctgttttaatgcaggggcttttcttccttagaaaccaattctaagcagaaagaagcaaaaaaagccaaaagattaaaaaacgctagaaaaaatttaaaacaaatggcagcaggggtagttaccaattggagtcttagatgacgtcttcaagttagaacg

SEQ ID NO: 171 - DNA, 1051 bp, Homo sapiens
tcaagcatggctgaccaggcgcccttcgacacggacgtcaacaccctgacccgcttcgtcatggaggagggcaggaaggcccgcggcacgggcgagttgacccagctgctcaactcgctctgcacagcagtcaaagccatctcttcggcggtgcgcaaggcgggcatcgcgcacctctatggcattgctggttctaccaacgtgacaggtgatcaagttaagaagctggacgtcctctccaacgacctggttatgaacatgttaaagtcatcctttgccacgtgtgttctcgtgtcagaagaagataaacacgccatcatagtggaaccggagaaaaggggtaaatatgtggtctgttttgatccccttgatggatcttccaacatcgattgccttgtgtccgttggaaccatttttggcatctatagaaagaaatcaactgatgagccttctgagaaggatgctctgcaaccaggccggaacctggtggcagccggctacgcactgtatggcagtgccaccatgctggtccttgccatggactgtggggtcaactgcttcatgctggacccggccatcggggagttcattttggtggacaaggatgtgaagataaaaaagaaaggtaaaatctacagccttaacgagggctacgccaaggactttgaccctgccgtcactgagtacatccagaggaagaagttccccccagataattcagctccttatggggcccggtatgtgggctccatggtggctgatgttcatcgcactctggtctacggagggatatttctgtaccccgctaacaagaagagccccaatggaaagctgagactgctgtacgaatgcaaccccatggcctacgtcatggagaaggctgggggaatggccaccactgggaaggaggccgtgttagacgtcattcccacagacattcaccagagggcgccggtgatcttggggtcccccgacgacgtgctcgagttcctgaaggtgtatgagaagcactctgcccagtgagcacctgccctgcctgcatccggagaat

SEQ ID NO: 172 - DNA, 2106 bp, Homo sapiens
aattccggcagagctccgtttcctcatagaacaaagaacatccaccatgcagctcttcctcctcttgtgcctggtgcttctcagccctcagggggcctcccttcaccgccaccacccccgggagatgaagaagagagtcgaggacctccatgtaggtgccacggtggcccccagcagcagaagggactttacctttgacctctacagggccttggcttccgctgcccccagccagaacatcttcttctcccctgtgagcatctccatgagcctggccatgctctccctgggggctgggtccagcacaaagatgcagatcctggagggcctgggcctcaacctccagaaaagctcagagaaggagctgcacagaggctttcagcagctccttcaggaactcaaccagcccagagatggcttccagctgagcctcggcaatgcccttttcaccgacctggtggtagacctgcaggacaccttcgtaagtgccatgaagacgctgtacctggcagacactttccccaccaactttagggactctgcaggggccatgaagcagatcaatgattatgtggcaaagcaaacgaagggcaagattgtggacttgcttaagaacctcgatagcaatgcggtcgtgatcatggtgaattacatcttctttaaagctaagtgggagacaagcttcaaccacaaaggcacccaagagcaagacttctacgtgacctcggagactgtggtgcgggtacccatgatgagccgcgaggatcagtatcactacctcctggaccggaacctctcctgcagggtggtgggggtcccctaccaaggcaatgccacggctttgttcattctccccagtgagggaaagatgcagcaggtggagaatggactgagtgagaaaacgctgaggaagtggcttaagatgttcaaaaagaggcagctcgagctttaccttcccaaattctccattgagggctcctatcagctggagaaagtcctccccagtctggggatcagtaacgtcttcacctcccatgctgatctgtcccgcatcagcaaccactcaaatatccaggtgtctgagatggtgcacaaagctgtggtggaggtggacgagtcgggaaccagagcagcggcagccacggggacaatcttcactttcaggtcggcccgcctgaactctcagaggctagtgttcaacaggccctttctgatgttcattgtggataacaacatcctcttccttggcaaagtgaaccgcccctgaggtggggcttctcctgaaatctacaggcctcagggtgggagatgaagggggctatgctatggcccatctgtatgctggtagctagtgatttacgacaggtttagttgactagatgaggcattacaaataatattactctatggatgattgcttccacccacacgactgcaacatacaggtgccttggggaaatgtggagaacattcaatctgccgtcactattcatcaatgaagattagcactgagatccagagaggctggatggacttgctcaagttcaccagcatggtagtggcaaagagaggtccagagtcctggcccttgatgccgagctcatgccacaaagctcagtaggagggatgttccagtggatgagggccagccaggaagcacaggtccaaggctggtcccacacttatcagcagcaacaactgtcagttcatcctgcatgggaaaaatgttggaatgggagtctgaaatggggctactgtttcagtcctaacgtgctgtgtgacattgggacaacactttccctctctggacctcagtttccctctgtatacaaggatcagattcttgctgtgacccaagaactcctgaaatcatatagaaaggctggggtgggccctgtcattcgtggttgatttcaatacactcaagtgccattcatcctttaagaaaaacatctggatatcaaggtggaaatggcccatttaatgattgattatatcattttgtggatatagttataatctgatgggcctggctgggagtggaagaagggaagccttttgcaaatagtagagtgtcagttgcaggtgccaatgactaactttttg

SEQ ID NO: 173 - DNA, 1447 bp, Homo sapiens
agtcctgctctccgcacgccaccttaggcccgcagccgtgccgggtgctcttcagcatgtccttcatcccggtggccgaggattccgacttccccatccacaacctgccctacggcgtcttctcgaccagaggcgacccaagaccgaggataggtgtggccattggcgaccagatcctggacctcagcatcatcaagcacctctttactggtcctgtcctctccaaacaccaggatgtcttcaatcagcctacactcaacagcttcatgggcctgggtcaggctgcctggaaggaggcgagagtgttcttgcagaacttgctgtctgtgagccaagccaggctcagagatgacaccgaacttcggaagtgtgcattcatctcccaggcttctgccacgatgcaccttccagccaccataggagactacacagacttctattcctctcggcagcatgctaccaacgtcggaatcatgttcagggacaaggagaatgcgttgatgccaaattggctgcacttaccagtgggctaccatggccgtgcctcctctgtcgtggtgtctggcaccccaatccgaaggcccatgggacagatgaaacctgatgactctaagcctcccgtatatggtgcctgcaagctcttggacatggagctggaaatggctttttttgtaggccctggaaacagattgggagagccgatccccatttccaaggcccatgagcacatttttggaatggtccttatgaacgactggagtgcacgagacattcagaagtgggagtatgtccctctcgggccattccttgggaagagttttgggaccactgtctctccgtgggtggtgcccatggatgctctcatgccctttgctgtgcccaacccgaagcaggaccccaggcccctgccgtatctgtgccatgacgagccctacacatttgacatcaacctctctgttaacctgaaaggagaaggaatgagccaggcggctaccatatgcaagtccaattttaagtacatgtactggacgatgctgcagcagctcactcaccactctgtcaacggctgcaacctgcggccgggggacctcctggcttctgggaccatcagcgggccggagccagaaaacttcggctccatgttggaactgtcgtggaagggaacgaagcccatagacctggggaatggtcagaccaggaagtttctgctggacggggatgaagtcatcataacagggtactgccagggggatggttaccgcatcggctttggccagtgtgctggaaaagtgctgcctgctctcctgccatcatgagattttctctgctcttctggaaacaaagggctcaagcacccctttcaaccctgtgactggggtcctccctcgggctgtaggcctggtccgccattcagtgacaaataaagccattgtgctctgaggcctgc

SEQ ID NO: 174 - DNA, 1438 bp, Homo sapiens
agcacttcctcatagaccttggatgtgggaggattgcattcagtctagttcctggttgccggctgaaataacctgaattcaagccaggaagaagcagcaatctgtcttctggattaaaactgaagatcaacctactttcaacttactaagaaaggggatcatggacattgaagcatatcttgaaagaattggctataagaagtctaggaacaaattggacttggaaacattaactgacattcttcaacaccagatccgagctgttccctttgagaaccttaacatccattgtggggatgccatggacttaggcttagaggccatttttgatcaagttgtgagaagaaatcggggtggatggtgtctccaggtcaatcatcttctgtactgggctctgaccactattggttttgagaccacgatgttgggagggtatgtttacagcactccagccaaaaaatacagcactggcatgattcaccttctcctgcaggtgaccattgatggcaggaactacattgtcgatgctgggtttggacgctcataccagatgtggcagcctctggagttaatttctgggaaggatcagcctcaggtgccttgtgtcttccgtttgacggaagagaatggattctggtatctagaccaaatcagaagggaacagtacattccaaatgaagaatttcttcattctgatctcctagaagacagcaaataccgaaaaatctactcctttactcttaagcctcgaacaattgaagattttgagtctatgaatacatacctgcagacatctccatcatctgtgtttactagtaaatcattttgttccttgcagaccccagatggggttcactgtttggtgggcttcaccctcacccataggagattcaattataaggacaatacagatctaatagagttcaagactctgagtgaggaagaaatagaaaaagtgctgaaaaatatatttaatatttccttgcagagaaagcttgtgcccaaacatggtgatagattttttactatttagaataaggagtaaaacaatcttgtctatttgtcatccagctcaccagttatcaactgacgacctatcatgtatcttctgtacccttaccttattttgaagaaaatcctagacatcaaatcatttcacctataaaaatgtcatcatatataattaaacagctttttaaagaaacataaccacaaaccttttcaaataataataataataataataaaaaatgtattttaaagatggcctgtggttatcttggaaattggtgatttatgctagaaagcttttaatgttggtttattgttgaattcctagaaaagttttattggtagatgagtaaataaaatattgtaaaaaaacttattgtctataaagtatattaaaacattgttggctaataaaaaaaaaaaaaaa

SEQ ID NO: 175 - DNA, 5003 bp, Homo sapiens
ggatccattttataagctcaaagataattacttttcagactaagaatatttagggtaaaaagtactgttcaacatctctactgaggatgttatgatgtagcacactctataagctggagctaaaggaaactttccttaaagtgctatttactaaaaattggaacacattccttaagacaaatcgaagtgtggcacacaacatccaaacttccatcatagatacagaggtgttaccatctcccactcccaaatttctttgtcacgctgaggatactcaagaggagcaggacatgttggtcgcagcaggagaaacttgaaagcattcacttttatggaactcataagggagagaatctcttatttagtatcgtccttgatacatttattattttaaaagataatgtagccaaatgtcttcctctgtgttaaatctttacaaaactgaaatcttaaaatggtgacaaaaattctacttctgatagaatctattcatttttccaattagatagggcataattcttaatttgcaaaacaaaacgtaatatgcttatgaggttccatcccaaagaacctgctattgagagtagcattcagaataacgggtggaaatgccaactccagagtttcagatcctaccggtaattggggtagggaggggctttgggcggggcctccctagaggaggaggcgttgttagaaagctgtctggccagtccacagctgtcactaatcggggtaagccttgttgtatttgcgcgtgtgggtggcattctcaatgagaactagcttcacttgtcatttgagtgaaatctacaacccgaggcggctagtgctcccgcactactgggatctgagatcttcggagatgactgtcgcccgcagtacggagccagcagaagtccgacccttcctgggaatgggctgtaccgagaggtccgactagccccagggttttagtgagggggcagtggaactcagcgagggactgagagcttcacagcatgcacgagtttgatgccagagaaaaagtcgggagataaaggagccgcgtgtcactaaattgccgtcgcagccgcagccactcaagtgccggacttgtgagtactctgcgtctccagtcctcggacagaagttggagaactctcttggagaactccccgagttaggagacgagatctcctaacaattactactttttcttgcgctccccacttgccgctcgctgggacaaacgacagccacagttcccctgacgacaggatggaggccaagggcaggagctgaccagcgccgccctcccccgcccccgacccaggaggtggagatcctccggtccagccacattcaacacccactttctcctccctctgcccctatattcccgaaaccccctcctccttcccttttccctcctccctggagacgggggaggagaaaaggggagtccagtcgtcatgactgagctgaaggcaaagggtccccgggctccccacgtggcgggcggcccgccctcccccgaggtcggatccccactgctgtgtcgcccagccgcaggtccgttcccggggagccagacctcggacaccttgcctgaagtttcggccatacctatctccctggacgggctactcttccctcggccctgccagggacaggacccctccgacgaaaagacgcaggaccagcagtcgctgtcggacgtggagggcgcatattccagagctgaagctacaaggggtgctggaggcagcagttctagtcccccagaaaaggacagcggactgctggacagtgtcttggacactctgttggcgccctcaggtcccgggcagagccaacccagccctcccgcctgcgaggtcaccagctcttggtgcctgtttggccccgaacttcccgaagatccaccggctgcccccgccacccagcgggtgttgtccccgctcatgagccggtccgggtgcaaggttggagacagctccgggacggcagctgcccataaagtgctgccccggggcctgtcaccagcccggcagctgctgctcccggcctctgagagccctcactggtccggggccccagtgaagccgtctccgcaggccgctgcggtggaggttgaggaggaggatagctctgagtccgaggagtctgcgggtccgcttctgaagggcaaacctcgggctctgggtggcgcggcggctggaggaggagccgcggcttgtccgccgggggcggcagcaggaggcgtcgccctggtccccaaggaagattcccgcttctcagcgcccagggtcgccctggtggagcaggacgcgccgatggcgcccgggcgctccccgctggccaccacggtgatggatttcatccacgtgcctatcctgcctctcaatcacgccttattggcagcccgcactcggcagctgctggaagacgaaagttacgacggcggggccggggctgccagcgcctttgccccgccgcggacttcaccctgtgcctcgtccaccccggtcgctgtaggcgacttccccgactgcgcgtacccgcccgacgccgagcccaaggacgacgcgtaccctctctatagcgacttccagccgcccgctctaaagataaaggaggaggaggaaggcgcggaggcctccgcgcgctccccgcgttcctaccttgtggccggtgccaaccccgcagccttcccggatttcccgttggggccaccgcccccgctgccgccgcgagcgaccccatccagacccggggaagcggcggtgacggccgcacccgccagtgcctcagtctcgtctgcgtcctcctcggggtcgaccctggagtgcatcctgtacaaagcggagggcgcgccgccccagcagggcccgttcgcgccgccgccctgcaaggcgccgggcgcgagcggctgcctgctcccgcgggacggcctgccctccacctccgcctctgccgccgccgccggggcggcccccgcgctctaccctgcactcggcctcaacgggctcccgcagctcggctaccaggccgccgtgctcaaggagggcctgccgcaggtctacccgccctatctcaactacctgaggccggattcagaagccagccagagcccacaatacagcttcgagtcattacctcagaagatttgtttaatctgtggggatgaagcatcaggctgtcattatggtgtccttacctgtgggagctgtaaggtcttctttaagagggcaatggaagggcagcacaactacttatgtgctggaagaaatgactgcatcgttgataaaatccgcagaaaaaactgcccagcatgtcgccttagaaagtgctgtcaggctggcatggtccttggaggtcgaaaatttaaaaagttcaataaagtcagagttgtgagagcactggatgctgttgctctcccacagccattgggcgttccaaatgaaagccaagccctaagccagagattcactttttcaccaggtcaagacatacagttgattccaccactgatcaacctgttaatgagcattgaaccagatgtgatctatgcaggacatgacaacacaaaacctgacacctccagttctttgctgacaagtcttaatcaactaggcgagaggcaacttctttcagtagtcaagtggtctaaatcattgccaggttttcgaaacttacatattgatgaccagataactctcattcagtattcttggatgagcttaatggtgtttggtctaggatggagatcctacaaacatgtcagtgggcagatgctgtattttgcacctgatctaatactaaatgaacagcggatgaaagaatcatcattctattcattatgccttaccatgtggcagatcccacaggagtttgtcaagcttcaagttagccaagaagagttcctctgtatgaaagtattgttacttcttaatacaattcctttggaagggctacgaagtcaaacccagtttgaggagatgaggtcaagctacattagagagctcatcaaggcaattggtttgaggcaaaaaggagttgtgtcgagctcacagcgtttctatcaacttacaaaacttcttgataacttgcatgatcttgtcaaacagcttcatctgtactgcttgaatacatttatccagtcccgggcactgagtgttgaatttccagaaatgatgtctgaagttattgctgcacaattacccaagatattggcagggatggtgaaaccccttctctttcataaaaagtgaatgtcatctttttcttttaaagaattaaattttgtggcatgtctttttgttttggtcaggattatgaggtcttgagtttttataatgttcttctgaaagccttacatttataacatcatagtgtgtaaatttaaaagaaaaattgtgaggttctaattattttcttttataaagtataattagaatgtttaactgttttgtttacccatattttcttgaagaatttacaagattgaaaaagtactaaaattgttaaagtaaactatatcttatccatattatttcataccatgtaggtgaggatttttaacttttgcatctaacaaatcatcgacttaagagaaaaaatcttacatgtaataacacaaagctattatatgttatttctaggtaactccctttgtgtcaattatatttccaaaaatgaacctttaaaatggtatgcaaaattttgtctatatatatttgtgtgaggaggaaattcataactttcctcagattttcaaaagtatttttaatgcaaaaaatgtagaaagagtttaaaaccactaaaatagattgatgttcttcaaactaggcaaaacaactcatatgttaagaccattttccagattggaaacacaaatctcttaggaagttaataagtagattcatatcattatacaaatagtattgtgggttttgtaggtttttaaaataaccttttttggggagagaattgtcctctaatgaggtattgcgagtggc

SEQ ID NO: 176 - DNA, 3453 bp, Homo sapiens
gggccgccgcagaggcccggccgcagcgcagggaagcctgggggccagaggtcgccgctgccgccatgccgctgctcttcctcgagcgcttcccctggcccagcctccgcacctacacgggcctcagcggcctggccctgctgggcaccatcatcagcgcctaccgcgcgctcagccagcccgaggccggccccggcgagccggaccagctaacggcctcgctgcagcctgagccgccggcgcccgcccggccgagcgccgggggaccccgggcccgcgatgtggcccagtacctgctctcagacagcctcttcgtgtgggttctagtaaataccgcttgctgtgttttgatgttggtggctaagctcatccagtgtattgtgtttggccctcttcgagtgagtgagagacagcatctcaaagacaaattttggaattttattttctacaagttcattttcatctttggtgtgctgaatgtccagacagtggaagaggtggtcatgtggtgcctctggtttgccggacttgtctttctgcacctgatggttcagctctgcaaggatcgatttgaatatctttccttctcgcccaccacgccgatgagcagccacggtcgagtcctgtccctgttggttgccatgctgctttcctgctgtggactggcggccgtctgctccatcaccggctacacccacggaatgcacaccttggctttcatggctgcagagtctcttcttgtgacagtgaggactgctcatgtgattttacgatacgtaattcacctctgggacctcaaccacgaagggacgtgggaaggaaaggggacgtatgtctattacacagactttgtcatggagctcactctcctgtccctggacctcatgcaccatattcacatgttgttatttggcaacatctggttatccatggccagcctggtcatctttatgcagctgcgttacctgtttcatgaggtgcaacgtcgaattcgtcggcacaagaactatctacgtgtggttggaaacatggaggccaggtttgcagttgcaactccagaggagctggctgtcaacaatgacgactgtgccatctgttgggactccatgcaggctgcgcggaaactgccctgtggacatcttttccacaactcctgtcttcgttcctggctagaacaagacacctcctgtccaacatgcagaatgtctcttaatattgccgacaataatcgtgtcagggaagaacatcaaggagagaacttggatgagaatttggttcctgtagcagcagccgaagggagacctcgcttaaaccaacacaatcacttcttccatttcgatgggtctcggattgcgagctggctgccgagtttttcggttgaagtgatgcacaccaccaacattcttggcattacgcaggccagcaactcccagctcaatgcaatggctcatcagattcaagagatgtttccccaggttccataccatctggtactgcaggacctccagctgacacgctcagttgaaataacaacagacaatattttagaaggacggattcaagtaccttttcctacacagcggtcagatagcatcagacctgcattgaacagtcctgtggaaaggccaagcagtgaccaggaagagggagaaacttctgctcagaccgagcgtgtgccactggacctcagtcctcgcctggaggagacgctggacttcggcgaggtggaagtggagcccagtgaggtggaagacttcgaggctcgtgggagccgcttctccaagtctgctgatgagagacagcgcatgctggtgcagcgtaaggacgaactcctccagcaagctcgcaaacgtttcttgaacaaaagttctgaagatgatgcggcctcagagagcttcctcccctcggaaggtgcgtcctctgaccccgtgaccctgcgtcgaaggatgctggctgccgccgcggaacggaggcttcagaagcagcagacctcctagcgctcccttgccttcctcagctgcctcctgcgccctgtgcccgactgactggaggaggcctgtcccaattctgcccgctccatggaaaagcgggcttgactgcattgccgctgtataaagcatgtggtcttatagtgtttggacagctgataaatttaatccttctttgtaatactttctatgtgacatttctcttccccttagaaacactgcaaattttaactgtaggtatgatctcttctggtgttgactggactgcttggggtgggggacgatcaggaggaagtgagcagtcgcctgcctgcagcaggcagcttctactcctgcctcatgcatacgtcccacaaatgcaggtgtcctgagcaccacacccagtgggaagagtgtgggggaggcgcacagtgtgagcccgcccccacgtcgtggggtaacatctgttatcaaactgctgtcgttgttgtggaagcatgtagactgtgccagaggccagacccacgggctcatgcacccctgagccagcagggcatcttggaaaaggaactcttggttcgatacctggagcagaggaggggaaagtccagggctatagggtgtgatgaagtcacccctttctgtcccactacatctgggactgactttccgagcctccagtccaaagccggcttgatttccgtgaactctggtgctcctgcatctcatgagtgtgccccatgggtcccctcccctctcagcatttccttgtcccgtctggacctggggagtggttaggcagcaagctttggtttatggttttcattcattggtgaagtaaattaggcagtgctaaagcctgtgggtttggtccttgaacaagatgtgggccttgcaagatgggagagtaaaccttgaagggctttattaaagaaataaaaaagaacttttgtatcttttatcctgggagcactgcgttttcctagctgtgttattcctggtttaattcagcagagaaggtaaggtgtgaacctacctgccttggagagggcccaggtcccaaatctcttcaaattcttcacatgtttaactttaaggatttgaaccatgaagtcataggttacagacctcagttttatgccccattggattacttttttttttttttttttttttttttttttactctttgaaagctttgttttgtggtagtccttttgggaagaatccagtattatctacaattattggcaaagtttaaatgtattttacataacggaaagtttttagaatgttgaaaagtaattgaaaaaggtgataggtaaatttttaggcaaagataatttatttcaataaatctttcaaaagccttaccttgaaatgctgttagtaaatttctgtgatttttttttttaatttgttttgctgagagcatagctatttgtttttattgtaaaacaataataataataaaaagcaaactcta

SEQ ID NO: 177 - DNA, 1038 bp, Homo sapiens; identical to SEQ ID NO: 77

SEQ ID NO: 178 - DNA, 3891 bp, Homo sapiens
gcgcactctggggaaagcggagctgcaccccgccccgtattgctgctcagctcctcagctgtgcgtgcgagggacgtcgggggtggcgccgcagcagttgcccctggtaacgggggaggcagcaggaggaggaggaggaggagggactcggcgggaggatgggcttgctctcaattttgcgcaagttgaaaagtgcaccagaccaggaggtgagaatacttctcctgggcttggataatgctggcaagaccactcttctgaagcagcttgcatctgaagacatcagccacatcacacctacacagggtttcaacatcaaaagtgtacaatcacaaggttttaaactgaatgtatgggacattggtggacagaggaaaatcagaccatactggaagaattattttgaaaataccgatattcttatatatgtaatcgacagtgcagacagaaaaagatttgaagagacgggtcaggaactagcggaattactggaggaagaaaaactaagttgtgtgccagtgctcatctttgctaataagcaggatttgctcacagcagcccctgcctctgaaattgcagaaggactgaacctgcataccatccgcgaccgagtctggcagatccagtcttgctcagctctcacaggagagggcgttcaggatggcatgaactgggtctgcaaaaatgtcaatgcaaagaagaaataaaatctagacgaatggagatgcaggagctgcgggagccgaattcggtcctgaaaaacactaatttgctgctttctgaccaaatgtttttccatctgtgtacagctccagctgtttgaagagagggaacaacacggtttagaaagaatccccattccagcagtagatttaactgatctctgaggttcagtatcatttttcaaataaaggaattatattatttcctctgcataattgaaatagtattaaatgtctcaaagcacatgattagaaaatgagatcttttaaatgagcaagagattgcattgcagtttagacaattccagtgggcttttttttcctctcaaaaaaaaaaaaagaaaaagaaaaagaggaagaagcagctttgctgagttcatttatttactgacccgtcccttgcattccctccatggttttgaaaccacagacagtgtttgctggtgctgtcagtgatttttaccgtcactagcccagccaggcttcagtctgtccgacaggaagctgctgggtgggggtggggggagaaaaggcagataattaaaccatctcatcgtcttgcaggtcggagactacgtatgtaatcctcactctttggacagaaaaaaaaaaaaaagtctttcttgcagacaagtcactacagaaacataccccatcccacccacccctgcctctgccccagccagccacacagagaagcaaattcttatgacttttgactgtaatgacatctggaatgtaaggagaggtgggaggtttaattccagaaaaattacaaggtccttaaaaagctctcacatcgagggctcaggctagcgtaaacaggctttctccagctcagtggagcagtgagcagccgactctgagattagctggcttctccacggccgtcctatagacaggatttctaaagctcaaagaattctgtgtttaaacgatcacaataggccgctgctatcagattttagaaataaatgcagctttaccatgaacctgctccactgagaaaagccaggcagatcgatttttagatcaatttttacagtgctggcaacttggtggtgtgggatgctcctggatggagagggtttgctgctggggaggacatgggtgtgtgtgtgactgcaggggtcgtgtccaaggaatcaagagtcaccccagctgctgggctcctctgcctctctgcagcagaatgtccgtcctctgttgattgattggagaggaatagcagaacatttctcctgcccctcgttgcaaaacgagcttgtttccctgaacctcagaaatcctcagcttcaaacatggggaaacaggccagagcattgcccggctcctgaattaaactctgttctggtgcctgagctcaggggttttcagagaatgaataagagactgtccagtgactggtgggtccctgggggccagctgccttctcatcctgggaggtggcccttcccaagcccatcagggcgtgtgagcagactgaaggggccgctgcagcccctggccctcaatacccagctgcttctggctaagagtgcagcagagactgaggcatagccagcttcaaaagcgatctgacatgaaagtcattaacaaagccagccgtgaaaaggtgccccagagttgctgtggacagacctgtaaggacttgcaaaacaaaagaaagtgaggggtttttttaacctcagagctagctgctctctgcagcctcctccactggcttctctggctcacccaagctctcccttacagaggcaacacagaattataaggaatcagaaatcccccttctaccaggctgcaaatgtggctctagcacttgcaaattgttttttcttccgaatagttcagcagggacaagttatctgaggggcaaaatgcctgcttggaggtctgcaattttggaacactgcagtatggaactttggcattggagggtctgtaaaatatttttgttcttttaccaccaacttaggggactgttttaaagagccatcccaaggcctctcctagcaggcagaagccactcctctgataacggcctctgtaaatgttctgatttgctctcagctgcagagacacagagacactgcagatgtcacacgctttcatcttccctttgagcccttttgaaccctcctggggctctggggtagatgagagaagcctgaaaaaggcagagtttgaaagctcccatttaaaaacaaaatactttttaaagccctcttgcctcttccctgcccactcctgccccctgaccagaagacagaatttgaagctggaaagggaagaccccttttcccctcctcctgtccccagtgagtcttagcgagacttttgccctgcgcacaattgcatctgaatgtgcgggggagagggctgggggccggagggcaggcaaggcctggggggtgctcgtgatatgtgctcaagccagttgtgggaaaaactcgagtcctcccctcctcccgacctaccccgtgtggctgcttttggctggattccctgcacccagtgcaacacaccctttccccttcactctcccttggttactatggaaacaagggtgtcattgatgtgggctgagctggggaacatgtcggtgcacagctgaaagtcagcgattatgccggcggttagaaatgtgccagggttaaaggagtccgcagctcccacggctgctgggaggacatggtcctgcccccttccttcctccctccctccgtctccacttctctctccttgcttttgacaaatttctttattcccctctggactaaagtagtggctatttttgtgccactctgcgccccaccctcactgttggccgctccttatccggcctggcctggagggtgacaccatgtcaccctcaccaggactcgtctctccattcccgtcagagtttgctttgatttccctttcctttccttctcggggaccagttcttacttccttttatttttagctctgcactccatgtggtttcagggttcagtctgatccatcaaaaggttctttttttataatcccttttgaaaatgataatcaaaggaagagatgtggtgtttggtcatgtggaaaactcaatgtataatttagacgtctgtcaaaaatccgacaaataaaatttagctggaacgaaaaaaaaaaaaaaaaaaaaaaa

SEQ ID NO: 179 - DNA, 2376 bp, Homo sapiens
gaggaggagtggggaccgggcggggggtggaggaagaggcctcgcgcagaggagggagcaattgaatttcaaacacaaacaactcgacgagcgcgcacccaccgcgccggagccttgccccgatccgcgcccgccccgtccgtgcggcgcgcgggcggagacgccgtggccgcgccggagctcgggccgggggccaccatcgaggcgggggccgcgcgagggccggagcggagcggcgccgccaccgccgcacgcgcaaacttgggctcgcgcttcccggcccggcgcggagcccggggcgcccggagccccgccatgtcgcgatccaaccggcagaaggagtacaaatgcggggacctggtgttcgccaagatgaagggctacccacactggccggcccggattgacgagatgcctgaggctgccgtgaaatcaacagccaacaaataccaagtcttttttttcgggacccacgagacggcattcctgggccccaaagacctcttcccttacgaggaatccaaggagaagtttggcaagcccaacaagaggaaagggttcagcgaggggctgtgggagatcgagaacaaccctactgtcaaggcttccggctatcagtcctcccagaaaaagagctgtgtggaagagcctgaaccagagcccgaagctgcagagggtgacggtgataagaaggggaatgcagagggcagcagcgacgaggaagggaagctggtcattgatgagccagccaaggagaagaacgagaaaggagcgttgaagaggagagcaggggacttgctggaggactctcctaaacgtcccaaggaggcagaaaaccctgaaggagaggagaaggaggcagccaccttggaggttgagaggccccttcctatggaggtggaaaagaatagcaccccctctgagcccggctctggccgggggcctccccaagaggaagaagaagaggaggatgaagaggaagaggctaccaaggaagatgctgaggccccaggcatcagagatcatgagagcctgtagccaccaatgtttcaagaggagcccccaccctgttcctgctgctgtctgggtgctactggggaaactggccatggcctgcaaactgggaacccctttcccaccccaacctgctctcctcttctactcacttttcccactccaagcccagcccatggagattgacctggatggggcaggccacctggctctcacctctaggtccccatactcctatgatctgagtcagagccatgtcttctccctggaatgagttgaggccactgtgttccttccgcttggagctattttccaggcttctgctggggcctgggacaactgctcccacctcctgacacccttctcccactctcctaggcattctggacctctgggttgggatcaggggtaggaatggaaggatggagcatcaacagcagggtgggcttgtggggcctgggaggggcaatcctcaaatgcggggtgggggcagcacaggagggcggcctccttctgagctcctgtcccctgctacacctattatcccagctgcctagattcagggaaagtgggacagcttgtaggggaggggctcctttccataaatccttgatgattgacaacacccatttttccttttgccgaccccaagagttttgggagttgtagttaatcatcaagagaatttggggcttccaagttgttcgggccaaggacctgagacctgaagggttgactttacccatttgggtgggagtgttgagcatctgtccccctttagatctctgaagccacaaataggatgcttgggaagactcctagctgtcctttttcctctccacacagtgctcaaggccagcttatagtcatatatatcacccagacataaaggaaaagacacattttttaggaaatgtttttaataaaagaaaattacaaaaaaaaattttaaagacccctaaccctttgtgtgctctccattctgctccttccccatcgttgcccccatttctgaggtgcactgggaggctccccttctatttggggcttgatgactttctttttgtagctggggctttgatgttccttccagtgtcatttctcatccacataccctgacctggccccctcagtgttgtcaccagatctgatttgtaacccactgagaggacagagagaaataagtgccctctcccaccctcttcctactggtctctctatgcctctctacagtctcgtctcttttaccctggcccctctcccttgggctctgatgaaaaattgctgactgtagctttggaagtttagctctgagaaccgtagatgatttcagttctaggaaaataaaacccgttgattact

SEQ ID NO: 180 - DNA, 2919 bp, Homo sapiens
tctgtgattgtggccaggcggggcaccctcggaggggagggttcggaagtggaatgcgaccccccagcctctttcccctaggggctgtaatctgatccctggggactccccccctagcctcccgccctcgccctcactgctgactcctcttccagatcctggggcagagtccagggcagctcaaggctcctccacacacacacccgctgaaccctgagcaccctgagctgctgagatggggcgggccggggctgccgccgtgatcccgggcctggccctgctctgggcagtggggctggggagtgccgcccccagccccccacgccttcggctctccttccaagagctccaggcctggcatggtctccagactttcagcctggagcgaacctgctgctaccaggccttgctggtggatgaggagcgtggacgcctgtttgtgggtgccgagaaccatgtggcctccctcaacctggacaacatcagcaagcgggccaagaagctggcctggccggcccctgtggaatggcgagaggagtgcaactgggcagggaaggacattggtactgagtgcatgaacttcgtgaagttgctgcatgcctacaaccgcacccatttgctggcctgtggcacgggagccttccacccaacctgtgcctttgtggaagtgggccaccgggcagaggagcccgtcctccggctggacccaggaaggatagaggatggcaaggggaagagtccttatgaccccaggcatcgggctgcctccgtgctggtgggggaggagctatactcaggggtggcagcagacctcatgggacgagactttaccatctttcgcagcctagggcaacgtccaagtctccgaacagagccacacgactcccgctggctcaatgagcccaagtttgtcaaggtattttggatcccggagagcgagaacccagacgacgacaaaatctacttcttctttcgtgagacggcggtagaggcggcgccggcactgggacgcctgtccgtgtcccgcgttggccagatctgccggaacgacgtgggcggccagcgcagcctggtcaacaagtggacgacgttcctgaaggcgcggctggtgtgctcggtgcccggcgtcgagggcgacacccacttcgatcagctccaggatgtgtttctgttgtcctcgcgggaccaccggaccccgctgctctatgccgtcttctccacgtccagcagcatcttccagggctctgcggtgtgcgtgtacagcatgaacgacgtgcgccgggccttcttgggaccctttgcacacaaggaggggcccatgcaccagtgggtgtcataccagggtcgcgtcccctacccgcggccaggcatgtgccccagcaagacctttggcaccttcagttccaccaaggacttcccagacgatgtcatccagtttgcgcggaaccaccccctcatgtacaactctgtcctgcccactggggggcgccctcttttcctacaagttggagccaattacaccttcactcaaattgccgcggaccgggttgcagccgctgacggacactatgacgtcctcttcattggcacagacgttggcacggtgctgaaggtgatctcggtccccaagggcagtaggcccagcgcagaggggctgctcctggaggagctgcacgtgtttgaggactcggccgctgtcaccagcatgcaaatttcttccaagaggcaccagctgtacgtagcctcgcggagcgcggtggcccagatcgcgttgcaccgctgcgctgcccacggccgcgtctgcaccgaatgctgtctggcgcgtgacccctactgcgcctgggacggggtcgcgtgcacgcgcttccagcccagtgccaagaggcggttccggcggcaagacgtaaggaatggcgaccccagcacgttgtgctccggagactcgtctcgtcccgcgctgctggaacacaaggtgttcggcgtggagggcagcagcgcctttctggagtgtgagccccgctcgctgcaggcgcgcgtggagtggactttccagcgcgcaggggtgacagcccacacccaggtgctggcagaggagcgcaccgagcgcaccgcccggggactactgctgcgcaggctgcggcgccgggactcgggcgtgtacttgtgcgccgccgtcgagcagggctttacgcaaccgctgcgtcgcctgtcgctgcacgtgttgagtgctacgcaggccgaacgactggcgcgggccgaggaggctgcgcccgccgcgccgccgggccccaaactctggtaccgggactttctgcagctggtggagccgggcggaggtggcagcgcgaactccctgcgcatgtgccgcccgcagcctgcgctgcagtcactgcccctggagtcgcggagaaagggccgtaaccggaggacccacgcccctgagcctcgcgctgagcgggggccgcgcagcgcaacgcactggtgaccagactgtccccacgccgggaaccaagcaggagacgacaggcgagagaggagccagacagaccctgaaaagaaggacgggttggggccgggcacattgggggtcaccggccgatggagacaccaaccgacaggccctggctgagggcagctgcgcgggcttatttattaacaggataacccttgaatgtagcagccccgggagggcggcacaggtcgggcgcaggattcagccggagggaagggacggggaagccgagctccagagcaacgaccagggccgaggaggtgcctggagtgcccaccctgggagacagaccccacctccttgggtagtgagcagtgagcagaaagctgtgaacaggctgggctgctggaggtggggcgaggcaggccgactgtactaaagtaacgcaataaacgcattatcagcca

SEQ ID NO: 181 - DNA, 1519 bp, Homo sapiens
ctgcctcggaacgctgtcccccgcagcgacggcccgttccacctcgcgatctgccgggtacccgggcggcgtggcgctcggcctccagggatccactgtgcggtgccaaaaaagaggcggaggctcgcggcacagctctcccggcgcagctctcgggccgccgccgccgctcccaggcccgtctcccggcccgtggcagtcggggctcgcggacaaaacaagttgagcgcgagcgcgttgattggttggcggacggtgcgaggtggacgctgattggctgagggcagcgcgaggcgggcgctgattggctgcgacgcgccgacgccggtgttttgcagtcctgggcagctcggcagtccagcccggcccgggtcatggtggtgggccgagggctgctcggccgccgcagcctcgccgcgctgggagccgcctgcgcccgccgaggcctcggtccagccctgctgggagttttctgccacacagatttgcggaagaacctgaccgtggacgagggcaccatgaaggtagaggtgctgcctgccctgaccgacaactacatgtacctggtcattgatgatgagaccaaggaggctgccattgtggatccggtgcagccccagaaggtcgtggacgcggcgagaaagcacggggtgaaactgaccacagtgctcaccacccaccaccactgggaccatgctggcgggaatgagaaactggtcaagctggagtcgggactgaaggtgtacgggggtgacgaccgtatcggggccctgactcacaagatcactcacctgtccacactgcaggtggggtctctgaacgtcaagtgcctggcgaccccgtgccacacttcaggacacatttgttacttcgtgagcaagcccggaggctcggagccccctgccgtgttcacaggtgacaccttgtttgtggctggctgcgggaagttctatgaagggactgcggatgagatgtgtaaagctctgctggaggtcttgggccggctccccccggacacaagagtctactgtggccacgagtacaccatcaacaacctcaagtttgcacgccacgtggagcccggcaatgccgccatccgggagaagctggcctgggccaaggagaagtacagcatcggggagcccacagtgccatccaccctggcagaggagtttacctacaaccccttcatgagagtgagggagaagacggtgcagcagcacgcaggtgagacggacccggtgaccaccatgcgggccgtgcgcagggagaaggaccagttcaagatgccccgggactgaggccgccctgcaccttcagcggatttggggattaggctcttttaggtaactggctttcctgctggtccgtgcgggaaattcagtcttgatttaaccttaattttacagcccttggcttgtgttatcggacattctaatgcatatttataagagaagtttaacaagtatttattcccataaaaaaaaaaaaaaaaaaaaaaaaaaaaaaaaaaaaaaaa

SEQ ID NO: 182 - DNA, 800 bp, Homo sapiens; identical to SEQ ID NO: 15

SEQ ID NO: 183 - DNA, 4966 bp, Homo sapiens
ccacgcgtccgcagaggtttcagcgctgaggaggcctgagttccgtcatggccctctattatgaccaccagatagaagccccggatgcagcagggtcaccctcatttatcagctggcaccctgtccatccattcttggcagttgcttacatcagcacaacctcaacaggcagcgtggatatttacctggagcaaggggagtgcgtgccagatacacacgtcgagaggccgttccgggttgcttccctgtgctggcacccgacgcggctggtgctggctgtgggctgggagactggagaagtgacggtgtttaacaagcaggacaaggagcagcacacgatgcccctgacacacacagccgacatcaccgtgctccgttggagccccagtggaaactgcctgctgtctggggacaggcttggtgtcttgctcttgtggaggttggaccaaaggggccgagtgcaagggacgcctctgctgaaacacgagtatgggaaacacctcacgcactgcatcttccggctcccccctcctggcgaggacctggttcagttggcaaaggcagctgtgagcggtgatgagaaagccctggacatgtttaactggaagaagagcagttctggaagtttgctgaagatggggtctcacgaggggctgttgttctttgtcagtctgatggacgggacagtgcactatgtggatgagaagggcaagaccactcaggtggtgtccgcagacagcacgattcagatgctgttctacatggagaagagggaggcactggtggtggtcacagagaacctccggctgtccctgtacacggtgcctcctgagggcaaagcagaagaagtgatgaaggtcaagctgagcgggaaaaccggccgccgggcagacatcgctttgattgaaggcagccttctcgtgatggccgtcggggaggctgccctcagattctgggacatagaacgaggagagaattatatactgagtccagatgagaagtttggctttgagaaaggagagaatatgaactgtgtgtgttactgtaaagtcaaaggtcttctggccgctggtaccgacagagggcgagtagccatgtggaggaaagtaccagacttcctgggcagccccggggcagagggcaaggacaggtgggcccttcagacccctaccgagctccaaggaaacatcacgcaaatccagtggggttccaggaagaacctgctggcagtgaacagcgtcatctccgtggccatcctcagcgagcgggccatgtcgtcacacttccaccagcaagtggccgccatgcaggtctccccgagtctgctgaatgtgtgcttcctgtccacgggggtcgcacacagcctgcgcaccgacatgcacatcagtggagtgtttgccaccaaggatgctgtcgcagtctggaacggaaggcaggtggcgatcttcgagctttctggagccgcgatacggagtgcagggaccttcttgtgtgagacgcctgtgttagcaatgcatgaagaaaacgtttacacggtggagtcaaaccgagttcaagttcgaacctggcaggggactgtcaaacaactcctccttttctcggagactgaggggaatccctgcttcttggacatctgtgggaatttcctggttgtagggacagacttggctcactttaaaagctttgatctttcccgaagagaggccaaagcacactgtagctgcaggagcctggcggagctggtccctggggtggggggcatcgcttctctgcggtgcagcagcagcgggagcaccatcagcatcctccccagcaaggctgacaacagccctgattccaaaatctgcttctacgatgttgaaatggacacagtgaccgtctttgacttcaagactggacaaattgatcggagagagacgctgtcctttaatgagcaagagactaataagagccacctctttgtggatgagggactgaaaaattatgttcccgtgaaccacttctgggaccagagtgagccccggctgtttgtatgcgaagccgtgcaggagacgccgcgctcccagcctcagtctgcaaacgggcagccccaagatgggcgcgctggccctgcggcagatgttttgatcctgtccttcttcatttccgaagagcacggcttcctgcttcatgagagcttcccccggcctgccacctcccacagtctcctggggatggaagtgccttattactacttcacaagaaagcccgaagaagcagacagagaagacgaggtggagcctgggtgccaccacatccctcagatggtgtccaggagacccctgcgagactttgtggggctggaggactgcgacaaggccacccgggacgccatgctccacttcagcttctttgtcaccataggagacatggacgaagccttcaaatccatcaagctcatcaaaagtgaggccgtctgggagaacatggcgcgcatgtgcgtgaagacccagcggctggacgtggccaaggtgtgcctggggaacatgggccatgcccgcggggcccgagcgctgcgtgaggcggagcaggagccggagctagaggcccgcgtggccgtgctggccacgcagctgggcatgctggaggacgccgagcagctgtacaggaagtgcaagcgccacgacctcctgaacaagttctaccaggctgcgggccggtggcaggaggccctccaggtagccgagcaccacgatcgcgtgcacctgcgcagcacctaccaccgctatgccgggcacctggaggccagcgccgactgcagccgggccctcagttactacgagaagtcggacacgcaccgcttcgaggtgcccaggatgctgtcggaggacctgccgtccctggagctctacgtgaataaaatgaaggataagaccctgtggcggtggtgggcgcagtacctggagagccagggcgagatggacgccgcgctgcactactacgagctggcccgggaccacttctccctggtccgcatccactgcttccagggcaatgtccagaaggctgcgcaaatagccaacgagacaggaaacctggcggcctcctaccacctcgcccgccagtacgagagccaggaggaggtcgggcaggcggtgcacttctacacccgggcacaggccttcaagaatgccatccgcctgtgcaaggagaacggcctggacgaccagctcatgaacttggccctgctgagctcccccgaggacatgatcgaggcggcccgatactacgaggagaagggcgtgcagatggacagggcggtcatgctgtaccacaaggctggccacttctccaaggccctggagctggcctttgccacccagcagtttgtggccctacagctcatagcagaggacctggatgagacgtcagaccctgcgctcctggcccgctgctccgacttcttcatcgagcacagtcagtacgagagggcggtagagctgctgctggctgccaggaagtatcaggaagccctgcagctgtgcctggggcagaacatgagcatcaccgaggagatggcggaaaagatgaccgtggccaaggactcctcggacctgcctgaggagtcgcggcgggagctgctggagcagatagcagactgctgcatgcgccagggcagctaccacctggccaccaagaagtacacgcaggccggcaacaagctgaaggccatgagggcgctgctcaaatccggagacacggagaaaatcacgttcttcgcgagcgtgtccaggcagaaggaaatctacatcatggctgctaactacctgcagtccctggactggcggaaggagccggagatcatgaagaacatcatcggcttctacaccaaggggcgggccctggacctcctggctggcttttatgacgcttgtgcccaggtggagattgatgaataccagaactacgacaaagcccacggggcgctgaccgaggcctacaagtgcctggccaaggccaaggccaagagccccctggaccaggagaccaggctggcgcagctgcagagcaggatggcactggtgaagaggttcatccaggcccgcaggacgtacacagaggaccccaaggagtccatcaagcagtgtgagctgctcctggaggaaccagacctggacagcaccatccgcatcggggacgtctatggcttcctggtggagcactacgtgcggaaggaggaataccagacggcctacagattcctggaggagatgcggcggcggcttcccttggccaacatgtcctactacgtgagcccgcaggccgtggacgccgtgcaccgggggctgggtctcccactgccacgcaccgtccccgagcaggtccgccacaacagcatggaggacgccagggagctggacgaggaggtggtggaagaggcagatgacgacccctgaggggcctgggccccaggaccagcgtgctgctgcagaaaggcatcttctggaatttttttgtcagctgtggcaaagccagcatttttgctgggaaaaaacatgtctgtgttggaatacgcgacagagctgggcgagaacgcagcggcccgggccggcggagggtgtgacccgtctgcaccttgctctgtcccacctgcctctgggtgcccggcagctccactagatttttggattcattcctttgaagggagtcgggttcacccttccatcgtattctcccaactacacattgtaaagcctgagaaacttctagaacctcaggaagctgcagctggagggctggggcacctgcccccctgctccccacacatcatatcctccccatactcctgcagggcccacggctcctgagcaacagctgggacacccgggccttggcggctgcaccccctgctaggctctgcccaccggccaccaacactcctgtaattccaataaagcagtttattttctgaaaaaaaaaaaaaaaa

SEQ ID NO: 184 - DNA, 6463 bp, Homo sapiens
ctctcttgctcgctcgctccctctctctcctgctggctgcctgttctaggaagccagcgcggagaggggggggatgcacagcacaggggagagagattgcgcatgttggtcagtcgtgttttaaagagtacagtgcggggaggctgagaggggcgcatgcaacaacaacttttggaaggatggaagagaagaggcgaaaatactccatcagcagtgacaactctgacaccactgacagtcatgcgacatctacatccgcatcaagatgctccaaactgcccagcagcaccaagtcgggctggccccgacagaacgaaaagaagccctccgaggttttccggacagacttgatcacagccatgaagatcccggactcataccagctcagcccggatgactactacatcctggcagacccatggcgacaggaatgggagaaaggtgtgcaggtgcctgccggggcagaggccatcccagagcccgtggtgaggatcctcccaccactggaaggcccccctgcccaggcatccccgagcagcaccatgcttggtgagggctcccagcctgattggccagggggcagccgctatgacttggacgagattgatgcctactggctggagctcatcaactcggagcttaaggagatggagaggccggagctggacgagctgacattagagcgtgtgctggaggagctggagaccctgtgccaccagaatatggccagggccattgagacgcaggaggggctgggcatcgagtacgacgaggatgttgtctgcgacgtgtgtcgctctcctgagggcgaggatggcaacgagatggtcttctgtgacaagtgcaacgtctgtgtgcatcaggcatgctacgggatcctcaaggtgcccacgggcagctggctgtgccggacgtgtgccctgggtgtccagccaaagtgcctgctctgccccaagcgaggaggagccttgaagcccactagaagtgggaccaagtgggtgcatgtcagctgtgccctatggattcctgaggtcagcatcggctgcccagagaagatggagcccatcaccaagatctcgcatatcccagccagccgctgggctctgtcctgcagcctctgcaaggaatgcacaggcacctgcatccagtgttccatgccttcctgcgtcacagcgttccatgtcacatgcgcctttgaccacggcctggaaatgcggactatattagcagacaacgatgaggtcaagttcaagtcattctgccaggagcacagtgacgggggcccacgtaatgagcccacatctgagcccacggaacccagccaggctggcgaggacctggaaaaggtgaccctgcgcaagcagcggctgcagcagctagaggaggacttctacgagctggtggagccggctgaggtggctgagcggctggacctggctgaggcactggtcgacttcatctaccagtactggaagctgaagaggaaagccaatgccaaccagccgctgctgacccccaagaccgacgaggtggacaacctggcccagcaggagcaggacgtcctctaccgccgcctgaagctcttcacccatctgcggcaggacctagagagggttagaaatctgtgctacatggtgacaaggcgcgagagaacgaaacacgccatctgcaaactccaggagcagatattccacctgcagatgaaacttattgaacaggatctgtgtcgaggcctgtccacctcattccccatcgatggcaccttcttcaacagctggctggcacagtcggtgcagatcacagcagagaacatggccatgagcgagtggccactgaacaatgggcaccgcgaggaccctgctccagggctgctgtcagaggaactgctgcaggacgaggagacactgctcagcttcatgcgggacccctcgctgcgacctggtgaccctgctaggaaggcccgaggccgcacccgcctgcctgccaagaagaaaccaccaccaccaccaccgcaggacgggcctggttcacggacgactccagacaaagcccccaagaagacctggggccaggatgcaggcagtggcaaggggggtcaagggccacctaccaggaagccaccacgtcggacatcttctcacttgccgtccagccctgcagccggggactgtcccatcctagccacccctgaaagccccccgccactggcccctgagaccccggacgaggcagcctcagtagctgctgactcagatgtccaagtgcctggccctgcagcaagccctaagcctttgggccggctccggccaccccgcgagagcaaggtaacccggagattgccgggtgccaggcctgatgctgggatgggaccaccttcagctgtggctgagaggcccaaggtcagcctgcattttgacactgagactgatggctacttctctgatggggagatgagcgactcagatgtagaggccgaggacggtggggtgcagcggggtccccgggaggcaggggcagaggaggtggtccgcatgggcgtactggcctcctaactcacccccttccctgtcccaggccctgccctggtccccccacaaggcctcagcccagtcacaactgccatttccagtctctgctgagtgtcccagaccctcgaggctgccactccgtcgtggttttatttttaatatagagagagttttgaattctacactgttgtctttcctctgtgctggcctaggacattaggattccttccacggctccggccgctaggaccctgccaggtcccgcgcaccatccctgccctgcccacgtggtattgctgggctcctggctagatgcaagcaaggtggacaagagctcaggactccagcccactgccactgggtgacacagactgtcgtttgggcattatttcatggcagatgggccagtccagggcctaccccgccttgcccccagatcccactggggtccatttggggggtcctgctacactccaccgatccccaaggaagtataataaacgatacccagccagagtctactcactgtcacaagcacaacgagtttatatgagaaagcactgagggggtgcagagggcccgctagttccaggggaactgaaagctgttcctgatcagcccgtatcatctgaggcctgcctgcccaccctgccaccctcccctcccttgctgctctgcccctgccagtgcccagcccagcggctctgggaaggggttcccagaatccctcctgagctgtgccatttactcaggggactcccaaacagccagctgccagtgcaggtggagggctgtaggggagggccagtgcccagacagggtcatggggctcagaccagcccactgtagagaatcactctgaggctccaacttccttccttccttcggggccagtctcggccgaagtctggtcacgctcagacagagctgaccagaccagaccgtttgccttttcaagtttcctagtcctgctacaagatgagcttcttccgtggtttccttttggaaactcctccttccaacaagcagtgggatcccggggcccagggcgggccggtgttggccgctggggctgttgtaagtcttgctggatgttcccctgttcctgagccttaacccctcgcacagccatccccccccccgtcctgccatccccccccgccgtcctgccttccccaccccacccttaggtcccaggtagttgctctgaagagtttcagtagagtggccccagggtgatagctcagggaacaacaaaaaaggaattccgtgaaaacatttttttttctttgatgaattactcctgggtcacttccaccactggtaaagccagaacttctccaaaaagaaccttgcaaaaagtccagtgaatcagtcgaatcattctgtggatgccaaagaatattttgaccataatacagcacagcctggacctgacaacttgtcatttggacttttttttaaatggagttctttagcaacaaagtatagaaacatgttcattgcacacacccaaggagaagagctcaagcgcttggaagaggatgctttgctgctgctgaagtgtacctgggtgttagatttcagatcctgggctgagcccactgtgagctttcctaaactgtgagactcacagaggggaaagatactgacggtgaaaccagcatggaaaacgtctttaccatgtggttccctcctccccaaatacataaagcaaataagcaggatggggaacagcttgaccttcatccacccctaactccaaaactatcaaggtacgacagtggcattgtcatcgacactcaatttcatgtgaattttagcaaaacaggaaacaaagataatgactcagttcagaggatcggacaaatgtgtctagtccgggtggactcggagggagtggggtgggcttcaaggattctgggcgttgggatggcatgagctaccctgtagagtttagtctgcctgcccgccttggtagtagtgaccagtcagtgtcagcatcagtgtcccaaccccagtctctgtttactgcctttgaacagaacttcttccttccccatgctttgggtcacctcgggctgcaaccctgtctgtgccagattgcccggtctgaccctgcaggaagcaaagaggtgagcttaaagaacaaccaaactctgccaggggtcccagaaagcccagggtccagcagtctcagcacttggccccttgccccttcacaccatcctggggcaggggctgggcctccctggtggcaggggtgggtggagaattagggagagggtgcaacgagtctggccccttgcctcgggctggctggtgttcttccaagagcctctgctcacattgttggcctctggattctggcccttcttcattggctgttgctttggactggactgttgctgagcctgtgtcctgcagaacccagatgtctgttaggctggctggctgctgcgaggggaggggggtggcctttcatttggggtgccctttcactcccaggccaagccctggagcaatcttcttcaggcagctgtctccacctccaggatgtccagcaggctgcaaggagaaggatgccagccacccatcctcccccagttcccagcctttcccctgttggtcacagccgcttctgtctttttccggtctactgtccccagtgtagagggctttgctgtccctgagactgaggcaggttccttttccaggtcagaggtggaggtagatctttctctcaaccacatctgcctccacacacagctcctccgcagggaaggagaagctgctctgtaactcattctggctatcgtcccccttctcactgacctgaccgcccaccacctccttccccctcatcacatgacaaaggataatgtgcaagaaaagtatttttatgtatcataaatgtattttgaaacaaatgagaagaagaaaggtagaagggtttattttattaaatgagcctgacttagtgacagtgtgtgagcatttgcaatgtaagggcctcagcttccttggagaagccaccccaggtttccagacatagatgttgaattgtttgtggggggtgtgccaggccacgtctcgtgtgtccgtatgcaggcatgcctgtgtatactgtgtatgggcacactgggactagctgggacaattcctagagattcaactgcccaattctaaccaacattggcagcggctgaacttggcatttccttgctaactgccagatgtggccaacctttgtccatatgcaaaccactgaaaaatgatctggatttctatagcaaggcccttggggagggcactctcccatgcccttggcctcgctggccacattggccaatgagccagggctggagtctgagacctttggttgttctttaaggcacctcctgccactttctccctcagaggcacaaacactttgtgttccacgtcagtttgaggggacggtggggggatgatatgaatgtcacaggaggagacaccttctgtctttgtttcaaagaaagtgatgtgccatttgttaatatacaagagaaatattgaaaatatattgaaaagagcaattttaaattatttttggcttatgttgcaatatttattttcttgtattagaaaagattcctttgtagagaaaaaatgtatttttcattaacgcaaagacctatttctcctttttgtacattgtccatgtgcgcaacccttaacgagcaatagaatgtatggtcacctgggtgtggccagtgcccgctgtgccctgcatgattctgtgttgccgctgctgcatagttcccagccccatcctgtcctgctcactcatgggggcttccagaccccggccccaccagggcttgtgtcatagggagccctttgcactcctcgtgtgttggcaaacgcagttaataaagcagtgttttctgtgc

SEQ ID NO: 185 - DNA, 2171 bp, Homo sapiens
ggcggaagtagccgcaggcatggcggcggctatgccgcttgctctgctcgtcctgttgctcctggggcccggcggctggtgccttgcagaacccccacgcgacagcctgcgggaggaacttgtcatcaccccgctgccttccggggacgtagccgccacattccagttccgcacgcgctgggattcggagcttcagcgggaaggagtgtcccattacaggctctttcccaaagccctggggcagctgatctccaagtattctctacgggagctgcacctgtcattcacacaaggcttttggaggacccgatactgggggccacccttcctgcaggccccatcaggtgcagagctgtgggtctggttccaagacactgtcactgatgtggataaatcttggaaggagctcagtaatgtcctctcagggatcttctgcgcctctctcaacttcatcgactccaccaacacagtcactcccactgcctccttcaaacccctgggtctggccaatgacactgaccactactttctgcgctatgctgtgctgccgcgggaggtggtctgcaccgaaaacctcaccccctggaagaagctcttgccctgtagttccaaggcaggcctctctgtgctgctgaaggcagatcgcttgttccacaccagctaccactcccaggcagtgcatatccgccctgtttgcagaaatgcacgctgtactagcatctcctgggagctgaggcagaccctgtcagttgtatttgatgccttcatcacggggcagggaaagaaagactggtccctcttccggatgttctcccgaaccctcacggagccctgccccctggcttcagagagccgagtctatgtggacatcaccacctacaaccaggacaacgagacattagaggtgcacccacccccgaccactacatatcaggacgtcatcctaggcactcggaagacctatgccatctatgacttgcttgacaccgccatgatcaacaactctcgaaacctcaacatccagctcaagtggaagagacccccagagaatgaggcccccccagtgcccttcctgcatgcccagcggtacgtgagtggctatgggctgcagaagggggagctgagcacactgctgtacaacacccacccataccgggccttcccggtgctgctgctggacaccgtaccctggtatctgcggctgtatgtgcacaccctcaccatcacctccaagggcaaggagaacaaaccaagttacatccactaccagcctgcccaggaccggctgcaaccccacctcctggagatgctgattcagctgccggccaactcagtcaccaaggtttccatccagtttgagcgggcgctgctgaagtggaccgagtacacgccagatcctaaccatggcttctatgtcagcccatctgtcctcagcgcccttgtgcccagcatggtagcagccaagccagtggactgggaagagagtcccctcttcaacagcctgttcccagtctctgatggctctaactactttgtgcggctctacacggagccgctgctggtgaacctgccgacaccggacttcagcatgccctacaacgtgatctgcctcacgtgcactgtggtggccgtgtgctacggctccttctacaatctcctcacccgaaccttccacatcgaggagccccgcacaggtggcctggccaagcggctggccaaccttatccggcgcgcccgaggtgtccccccactctgattcttgccctttccagcagctgcagctgccgtttctctctggggaggggagcccaagggctgtttctgccacttgctctcctcagagttggcttttgaaccaaagtgccctggaccaggtcagggcctacagctgtgttgtccagtacaggagccacgagccaaatgtggcatttgaatttgaattaacttagaaattcatttcctcacctgtagtggccacctctatattgaggtgctcaataagcaaaagtggtcggtggctgctgtattggacagcacagaaaaagatttccatcaccacagaaaggtcggctggcagcactggccaaggtgatggggtgtgctacacagtgtatgtcactgtgtagtggatggagtttactgtttgtggaataaaaacggctgtttccgtg

SEQ ID NO: 186 - DNA, 548 bp, Homo sapiens
gggtgcttggccgtccctgccattagcgcgtaacgagagactgcttgctgcggcagagacgccagaggtgcagctccagcagcaatggcagtgacggcgttggcggcgcggacgtggcttggcgtgtggggcgtgaggaccatgcaagcccgaggcttcggctcggatcagtccgagaatgtcgaccggggcgcgggctccatccgggaagccggtggggccttcggaaagagagagcaggctgaagaggaacgatatttccgagcacagagtagagaacaactggcagctttgaaaaaacaccatgaagaagaaatcgttcatcataagaaggagattgagcgtctgcagaaagaaattgagcgccataagcagaagatcaaaatgctaaaacatgatgattaagtgcacaccgtgtgccatagaatggcacatgtcattgcccacttctgtgtagacatggttctggtttaactaatatttgtctgtgtgctactaacagattataataaattgtcatcagtgaaaaaaaaaaaaaaaaaaaaaaa

SEQ ID NO: 187 - DNA, 4652 bp, Homo sapiens
ggcattagagtcaaggattacattcttcctggagccaagcatggggccagctgtaaacaagccgcatttctccttggggagactgataatttaaaaggtttgttgtgtcagaaacattcccagcttcatcaccaaccctttccttccacctctgcccactggagaccacttacatcccgaagcggacgcggcagctgaagtcaggaaaccatgcatcacattagcaggagccaactgcagactttaaactccgttcaacatgtggatgcggcagagaaatgacctgtccagacaagccggggcagctcataaactggttcatctgctccctgtgcgtcccgcgggtgcgtaagctctggagcagccggcgtccaaggacccggagaaaccttctgctgggcactgcgtgtgccatctacttgggcttcctggtgagccaggtggggagggcctctctccagcatggacaggcggctgagaaggggccacatcgcagccgcgacaccgccgagccatccttccctgagatacccctggatggtaccctggcccctccagagtcccagggcaatgggtccactctgcagcccaatgtggtgtacattaccctacgctccaagcgcagcaagccggccaatatccgtggcactgtgaagcccaagcgcaggaaaaagcatgcagtggcatcggctgccccagggcaggaggctttggtcggaccatcccttcagccgcaggaagcggcaagggaagctgatgctgtagcacctgggtacgctcagggagcaaacctggttaagattggagagcgaccctggaggttggtgcggggtccgggagtgcgagccgggggcccagacttcctgcagcccagctccagggagagcaacattaggatctacagcgagagcgccccctcctggctgagcaaagatgacatccgaagaatgcgactcttggcggacagcgcagtggcagggctccggcctgtgtcctctaggagcggagcccgtttgctggtgctggaggggggcgcacctggcgctgtgctccgctgtggccctagcccctgtgggcttctcaagcagcccttggacatgagtgaggtgtttgccttccacctagacaggatcctggggctcaacaggaccctgccgtctgtgagcaggaaagcagagttcatccaagatggccgcccatgccccatcattctttgggatgcatctttatcttcagcaagtaatgacacccattcttctgttaagctcacctggggaacttatcagcagttgctgaaacagaaatgctggcagaatggccgagtacccaagcctgaatcaggttgtactgaaatacatcatcatgagtggtccaagatggcactctttgattttttgttacagatttataatcgcttagatacaaattgctgtggattcagacctcgcaaggaagatgcctgtgtacagaatggattgaggccaaaatgtgatgaccaaggttctgcggctctagcacacattatccagcgaaagcatgacccaaggcatttggtttttatagacaacaagggtttctttgacaggagtgaagataacttaaacttcaaattgttagaaggcatcaaagagtttccagcttctgcagtttctgttttgaagagccagcacttacggcagaaacttcttcagtctctgtttcttgataaagtgtattgggaaagtcaaggaggtagacaaggaattgaaaagcttatcgatgtaatagaacacagagccaaaattcttatcacctatatcaatgcacacggggtcaaagtattacctatgaatgaatgacaaaagaatcttctggctagggtgttagatatatttatgcatttttggttttgtttttaaatcaagcacatcaacctcaagcccgtttagcaatgaggcagtgtagatgaatacgtaaaataaatgactttaaccaagtagctataatgggacttagcactgtatgcatacttaaaaaggttttgaaaaacaaactacttgagaaatatttgtttatatttttctctaacatcatgctatgtgtcagtctgaacatctgacaacagaaatttcagttattattctagctaagttttgaaaacatttgtcatgctgtttaatagaaaactgcaaaccagagatactgactccattaataaaccatattttgtgccgttttgactgttctgaccaaatactaatgggaacaattcttgacgtttttctgttgctgattgttaacatagagcagtctctacactaccctgaggcaactctacattggaacactgaggcttacagcctgcaagagcatcagagctgaccatacatttaaacagaaatgctggtttatttgcaaaatcaccagtatattttctattgtgtctataaaaaatcagtcatttaagtacaagaatcatattttccattcctttttagaaatttattttgttgtccctatggaaatcattcacatctgacaatttatatgttaaagagttttactctctctattttggtccaatttgtatctagtggctgagaaattaaataattctaaagtatgaagttacctatctgaaaatgtacttacagagtatcattttaaaatggatgtctctttaaaaattttgttacttttaccaacaatgtaatataatttatgtatattttattaataatagtgaattccttaaaatttgttctatgtacttatatttaatttgatttaatggttactgcccagatattgagaaatggttcaaatattgagtgtgtttcaatatattatctggcttatttcaacatgagtaatatgagcaaaataagttaaaacctgcgtctgatcaattttcctcatgactagaactaaaacagtaaatttggacaatattaagcctcaaataatcatctccaaactccttctaacactttttaaatcagattggaagacatggacaaatcaggttcatgtgttgcatctttatgtcctttgccaatatccaagatcatcacatatggtagatattcacatggagtttcaaattcagaatagattaccattaccttcctgcccttacacatcctactccttatttaaaagttctatttgtgacttttcatttcctgaaagtttaaaaatacaatttgagaatgtttataatacattctctcctgtcttttcacggttacgtctgttattgctgaaatacaccacattttctttgttctggtcaaggttaactcaatatctgtgtgaaagggaactactaacaacgttacaatagaggctagatttgaaaaaaaaaatctatagatctaattgatacaattgtagaacaaaatgtcaaaataatgttttaagtataagagaagatggaccaaggagagagagatcatttgaaaatctaattgtagcttttctaggctcacattcatgtactacttttagcacccttatgggctgtgctcgccccctggacagttgagctttggattatcttcctcttcaattttccctctattgacccgagtgtctccctctgcttctacagatttatagtactctttggctcttttgagtctccacttttactcactgtctctgggatttttaagatccttttcttctcttataaatcatcctcttaatgaaaattagcctaacaaaagtttggagactggaatcctactttgagccactgacttgaaataactcttttggcaagttgcctgacaccctgtcttaccaaggtggcatatttgcatttttactgcttaaaacatttttttttttttaccatccttatccaaatttatcatattgatggtaggactaacaggctttttagaagctggctttaactttgagtctcaagctacaatgctgttgggcagcctggtcttcccacgtgagggtttaactttgtttatttgcctccagttattccaaaatgcttattaaatgaaaggcccaggaacatgtttattttagtcacctttgctttttaacaattttgttttgtaatcaatgagtaattcatgatgaattatttttgactaatggatagccgaaggccaagcttttaattctaataggtaatgttcttcttttgtcttattgaaacaatgagaatactctgtgcatttcaaatgcactccgattatgctgtggttttattcacataagcacaatatgtgttttatttataacttcataacaaacttataatataataatttaccttagcagacatgcaaaagcctattcttgtgtgacttactttctttaagctaataatataaaaataaatatgtatcttaaaaatctataataaaacattagaaattaaagatatgtgctttttattttgcagatgagttcatttgcttctgtagatgtgttttcagagctaggtacagaggaatgtttgctacctttagcggtgaaaaaagaaagagagtcaagaattttgttggattgtgtttgtgtgtgcatatatttgatatcatcatcatatttgtaatctttggacttgtaatcatagcctgtttattctactgtgccattaaatatactttaccttatacataacgaaaaaaaaaaaaaaaaaa

SEQ ID NO: 188 - DNA, 3737 bp, Homo sapiens
ggcgtccgcgcacacctccccgcgccgccgccgccaccgcccgcactccgccgcctctgcccgcaaccgctgagccatccatgggggtcgcgggccgcaaccgtcccggggcggcctgggcggtgctgctgctgctgctgctgctgccgccactgctgctgctggcgggggccgtcccgccgggtcggggccgtgccgcggggccgcaggaggatgtagatgagtgtgcccaagggctagatgactgccatgccgacgccctgtgtcagaacacacccacctcctacaagtgctcctgcaagcctggctaccaaggggaaggcaggcagtgtgaggacatcgatgaatgtggaaatgagctcaatggaggctgtgtccatgactgtttgaatattccaggcaattatcgttgcacttgttttgatggcttcatgttggctcatgacggtcataattgtcttgatgtggacgagtgcctggagaacaatggcggctgccagcatacctgtgtcaacgtcatggggagctatgagtgctgctgcaaggaggggtttttcctgagtgacaatcagcacacctgcattcaccgctcggaagagggcctgagctgcatgaataaggatcacggctgtagtcacatctgcaaggaggccccaaggggcagcgtcgcctgtgagtgcaggcctggttttgagctggccaagaaccagagagactgcatcttgacctgtaaccatgggaacggtgggtgccagcactcctgtgacgatacagccgatggcccagagtgcagctgccatccacagtacaagatgcacacagatgggaggagctgccttgagcgagaggacactgtcctggaggtgacagagagcaacaccacatcagtggtggatggggataaacgggtgaaacggcggctgctcatggaaacgtgtgctgtcaacaatggaggctgtgaccgcacctgtaaggatacttcgacaggtgtccactgcagttgtcctgttggattcactctccagttggatgggaagacatgtaaagatattgatgagtgccagacccgcaatggaggttgtgatcatttctgcaaaaacatcgtgggcagttttgactgcggctgcaagaaaggatttaaattattaacagatgagaagtcttgccaagatgtggatgagtgctctttggataggacctgtgaccacagctgcatcaaccaccctggcacatttgcttgtgcttgcaaccgagggtacaccctgtatggcttcacccactgtggagacaccaatgagtgcagcatcaacaacggaggctgtcagcaggtctgtgtgaacacagtgggcagctatgaatgccagtgccaccctgggtacaagctccactggaataaaaaagactgtgtggaagtgaaggggctcctgcccacaagtgtgtcaccccgtgtgtccctgcactgcggtaagagtggtggaggagacgggtgcttcctcagatgtcactctggcattcacctctcttcagatgtcaccaccatcaggacaagtgtaacctttaagctaaatgaaggcaagtgtagtttgaaaaatgctgagctgtttcccgagggtctgcgaccagcactaccagagaagcacagctcagtaaaagagagcttccgctacgtaaaccttacatgcagctctggcaagcaagtcccaggagcccctggccgaccaagcacccctaaggaaatgtttatcactgttgagtttgagcttgaaactaaccaaaaggaggtgacagcttcttgtgacctgagctgcatcgtaaagcgaaccgagaagcggctccgtaaagccatccgcacgctcagaaaggccgtccacagggagcagtttcacctccagctctcaggcatgaacctcgacgtggctaaaaagcctcccagaacatctgaacgccaggcagagtcctgtggagtgggccagggtcatgcagaaaaccaatgtgtcagttgcagggctgggacctattatgatggagcacgagaacgctgcattttatgtccaaatggaaccttccaaaatgaggaaggacaaatgacttgtgaaccatgcccaagaccaggaaattctggggccctgaagaccccagaagcttggaatatgtctgaatgtggaggtctgtgtcaacctggtgaatattctgcagatggctttgcaccttgccagctctgtgccctgggcacgttccagcctgaagctggtcgaacttcctgcttcccctgtggaggaggccttgccaccaaacatcagggagctacttcctttcaggactgtgaaaccagagttcaatgttcacctggacatttctacaacaccaccactcaccgatgtattcgttgcccagtgggaacataccagcctgaatttggaaaaaataattgtgtttcttgcccaggaaatactacgactgactttgatggctccacaaacataacccagtgtaaaaacagaagatgtggaggggagctgggagatttcactgggtacattgaatccccaaactacccaggcaattacccagccaacaccgagtgtacgtggaccatcaacccaccccccaagcgccgcatcctgatcgtggtccctgagatcttcctgcccatagaggacgactgtggggactatctggtgatgcggaaaacctcttcatccaattctgtgacaacatatgaaacctgccagacctacgaacgccccatcgccttcacctccaggtcaaagaagctgtggattcagttcaagtccaatgaagggaacagcgctagagggttccaggtcccatacgtgacatatgatgaggactaccaggaactcattgaagacatagttcgagatggcaggctctatgcatctgagaaccatcaggaaatacttaaggataagaaacttatcaaggctctgtttgatgtcctggcccatccccagaactatttcaagtacacagcccaggagtcccgagagatgtttccaagatcgttcatccgattgctacgttccaaagtgtccaggtttttgagaccttacaaatgactcagcccacgtgccactcaatacaaatgttctgctatagggttggtgggacagagctgtcttccttctgcatgtcagcacagtcgggtattgctgcctcccgtatcagtgactcattagagttcaatttttatagataatacagatattttggtaaattgaacttggtttttctttcccagcatcgtggatgtagactgagaatggctttgagtggcatcagcttctcactgctgtgggcggatgtcttggatagatcacgggctggctgagctggactttggtcagcctaggtgagactcacctgtccttctggggtcttactcctcctcaaggagtctgtagtggaaaggaggccacagaataagctgcttattctgaaacttcagcttcctctagcccggccctctctaagggagccctctgcactcgtgtgcaggctctgaccaggcagaacaggcaagaggggagggaaggagacccctgcaggctccctccacccaccttgagacctgggaggactcagtttctccacagccttctccagcctgtgtgatacaagtttgatcccaggaacttgagttctaagcagtgctcgtgaaaaaaaaaagcagaaagaattagaaataaataaaaactaagcacttctggagacat

SEQ ID NO: 189 - DNA, 3327 bp, Homo sapiens
ggaagaggaggggggagaaggaggagctgaagcgggaagagcggcaggcagcggctcggcggagttgcagcagaggcggcggcgacgctgagacaccgcagcttccctgagcgccgagtccctccggggacagcagcagggagcgcccgcgcagccaccgagcctctgcccagccaagccgccgtcgccgcgccgggggaccgccagccatggccgcgccgggggatccgcaggacgagctgctgccgctggccggccccgggtcccagtggctcaggcaccggggggagggggagaacgaagcggtgacgccgaaaggggccacgccggcgccgcaggctggggagcccagcccggggttgggcgccagggcccgggaagcggcgtcgcgggaagccggctcgggccccgcccggcagtcgcccgttgccatggaaactgcatccacaggtgtggcaggtgtttccagtgccatggaccacaccttctcaacaacatcaaaagatggggaaggatcgtgttacacatctctcatttctgacatctgctatccacctcaggaggattctacatattttactggaattcttcagaaggaaaatggccacgtcaccatttcagagagccctgaggagctgggtacacccggcccctccttaccagatgtgcctgggatagagtctcgtggcttatttagttctgattctggaatagagatgactcctgcagagtccacggaagtgaacaagatcttagcagaccctctggaccagatgaaagcagaggcctataaatacattgacataaccagacccgaggaggtgaagcaccaagaacaacatcaccccgagctggaagataaagacttggactttaagaataaagacactgacatctcaattaaacctgaaggagtccgtgaacctgacaaaccagctcctgtggagggaaaaatcatcaaggaccatttattggaagaatccacatttgctccatacatagatgatctctctgaagaacagcgcagggctcctcagatcaccacccctgtcaaaatcacactgacggaaatagaaccttctgttgaaaccactacccaagagaagacccctgagaagcaagatatatgtctaaagccaagtcctgacacagtccccactgtcactgtctcggagcctgaagacgacagcccaggatctatcacccctccatcttctggaacagaaccatctgctgcagaatcccaggggaaaggcagcatctccgaggatgagctgatcaccgccatcaaagaagcaaagggattatcgtatgaaaccgccgagaacccacggccggtgggccagctggccgacaggcccgaggtcaaggccaggtccggaccgccaaccatccccagccccctggaccacgaggccagcagcgcggagtcgggggactcagagatcgagctggtgtccgaggaccccatggccgcggaggacgcgctgccctcaggctatgtgagctttggccacgtgggcggcccgccgccctcgcccgcctcgccatccatccagtacagcatcctgagggaggagcgcgaggccgagctggacagcgagctcatcatcgagtcgtgcgacgcctcctcggcctcggaggagagccccaagcgggagcaggactcacccccgatgaagcccagcgccctggatgccatccgggaggagactggcgtccgggccgaggagcgtgcgccaagccggcggggcctggccgagccgggttccttcctcgactacccctcaactgagccccagcctggccccgagctgccccctggagacggagccctggagcctgagacgcccatgttgccacggaagcctgaagaagactcgagttccaaccaaagtcctgcggccacaaagggccctgggcctctaggtcctggcgccccgcccccactgctgtttctcaataagcaaaaagctattgacctgttgtattggcgggacatcaagcagacgggcatcgtgtttgggagtttcctgctgctgctcttctccctgacccagttcagcgtggtgagcgtcgtggcctacctggccctggccgcactctcagccaccatcagtttccgcatctacaagtctgttttacaagcagtgcagaaaaccgacgaaggccaccctttcaaggcctacttggagcttgagatcaccctttctcaggagcagattcagaagtacacggactgcctgcagttctacgtgaacagcacacttaaggaactgaggaggctcttccttgtccaggacctggtggattccttaaaatttgcagtcctgatgtggctcctgacctacgttggcgctctcttcaatggcctgaccctgctgctcatggctgtggtttcaatgtttactctacctgtagtgtatgttaagcaccaggcacagattgaccaatatctgggacttgtgaggactcacataaatgctgttgtggcaaagattcaggctaaaatcccaggcgctaagaggcacgctgagtaaactgatttcccaccggggactggacacaaacaggaatgtctggagtggtaacagctctcttcttactcattactgcaaattgattgtctttcccccctccctccagtaccataatcttagagacaaaccttaaaacagctgtttttaggctgttccttgtactcttaggatatttgagtcacttgtgtcaaccactaaagtatagagaaaagtgtattagatgtggtttttaattttgtgttgctaaaaaaagtgcatgatggtgagagcccaagttatctttccctcttcggtgttcttcttctcttctctgcaatgcttctgtagcttctaatgttccccgtggctaggcctttcctgccgagtgctctgatgcaatagtggaaatcgcttatatgtccttgggttgctggttggattaatctttaataacaatatatagaattgtagactgatgttttagcatttttccaacacacacaacgtaaaaataaaagcagtcgaccgcacttatggtaatcagttttgtataacttaaaataattaaataaatgaataaatccaaaacaaacatgcagtacttttgttgtatgggattggtgggctgatttacatgtatggttactaaaaagtaccagcatgttaactttattacaatttgtattactttctctgtagttcctaatggattcaattacggactctggatatttgcacttatgtacttgatactgaatgcataaataaatgttactaaatgtagaatgttaaaaaaaaaaaaaaaaaa

SEQ ID NO: 190 - DNA, 1306 bp, Homo sapiens
tgaaaaattttacagttaaaggaacattagtgttgcatttgcaataactaggacaagagccagtcacatgctgatcttttaagtaatgagaatactaagtaaattaacaccataacatagatttaaagaaaaaaagccattagaactaaattaatataataacgtccagttacagcctctggttctgcttaaaatttatcagattctatttacacgtagggaaaaggacataaaatgaatcttagccttgaatatattcatacttaattaacgcatcctaaaaaaccattaacttaaacatcttaaagtgttctataatgttggctttatatgttttaaagtaagaaactttctgccagtggctttctttcttttttttttttttttttaaagagaaagcatcttgttctgttgcccaagctggaatgcaagagcagagtaacagctcactgcagccactgcagccttgatcccctcacttcagcctcccgagcagctacaatcacaagcacgggccaccaaggccggctaacctttatttcttgtagacatggggtcttgctatgttgcccaggctggtctcaaactcccgtcctcaagcaatccacctgattacaggcatgagccactgcaactagcccagtggcttaatttctgcttagaaaaatataatacctatcatacttaataaacagatagcttaaaagcactgttctaataagagaatttaacatacaaaaacagtattcattttggtttatactcttaaaagattaaatattctggttgtatttaaaaataaatttttaaactttcatgaaagaatgtacggccaggcatggtggctcacgcctgtaatcccagcaccttgagaggccaaagtgggtggatcacctgaggtcgggagttcaagaccagcctgaccaacatgaagaaacctcatctctattaaaaatacaaaaaattagctgggactacaggtgcatgccacgacgcccagctgatttttgtgtttttagtagagacggggtttcaccatgttggccaagatggtctcaatctcttgaccttgtgatccacctgccttggccttccaaagtgttggaattacaggcgtgagccaccgcgcctggtctatatgtgatttcaaattaggtggccttataaatataagcagatggtttctgggcaaaatcaaatgatttctgtctctattttcttgagtaccaattgtaaaaactgaaattaggttgaggaaagtgctttagaaataataaagatgtacaaatacaaaaaaaaaaaaaaa

SEQ ID NO: 191 - DNA, 1286 bp, Homo sapiens
ggagcgcgcggtccgggcacacggagcaggttgggaccgcggcgggtaccggggccggggcgccatgcggaggccgagcgtgcgcgcggccgggctggtcctgtgcaccctgtgttacctgctggtgggcgctgctgtcttcgacgcgctcgagtccgaggcggaaagcggccgccagcgactgctggtccagaagcggggcgctctccggaggaagttcggcttctcggccgaggactaccgcgagctggagcgcctggcgctccaggctgagccccaccgcgccggccgccagtggaagttccccggctccttctacttcgccatcaccgtcatcactaccatcgggtacggccacgccgcgccgggtacggactccggcaaggtcttctgcatgttctacgcgctcctgggcatcccgctgacgctggtcactttccagagcctgggcgaacggctgaacgcggtggtgcggcgcctcctgttggcggccaagtgctgcctgggcctgcggtggacgtgcgtgtccacggagaacctggtggtggccgggctgctggcgtgtgccgccaccctggccctcggggccgtcgccttctcgcacttcgagggctggaccttcttccacgcctactactactgcttcatcaccctcaccaccatcggcttcggcgacttcgtggcactgcagagcggcgaggcgctgcagaggaagctcccctacgtggccttcagcttcctctacatcctcctggggctcacggtcattggcgccttcctcaacctggtggtcctgcgcttcctcgttgccagcgccgactggcccgagcgcgctgcccgcccccccagcccgcgccccccgggggcgcccgagagccgtggcctctggctgccccgccgcccggcccgctccgtgggctccgcctctgtcttctgccacgtgcacaagctggagaggtgcgcccgcgacaacctgggcttttcgcccccctcgagcccgggggtcgtgcgtggcgggcaggctcccaggcctggggcccggtggaagtccatctgacaaccccacccaggccagggtcgaatctggaatgggagggtctggcttcagctatcagggcaccctccccagggattggaaacggatgacgggcctctaggcggtcttctgccacgagcagtttctcattactgtctgtggctaagtcccctccctcctttccaaaaatatattacagtcacaccataaaaaaaaaaaaaaaaaaaaaaaaaaaaaaaaaaaaaaaaaa

SEQ ID NO: 192 - DNA, 2493 bp, Homo sapiens
tgggctaccagtgggctcccatcctagccaacttcctgcacatcatggcagtcatcctgggcatctttggcaccgtgcagtaccgctcccggtacctcatcctgtatgcagcctggctggtgctctgggttggctggaatgcatttatcatctgcttctacttggaggttggacagctgtcccaggaccgggacttcatcatgaccttcaacacatccctgcaccgctcctggtggatggagaatgggccaggctgcctggtgacacctgttctgaactcccgcctggctctggaggaccaccatgtcatctctgtcactggctgcctgcttgactacccctacattgaagccctcagcagcgccctgcagatcttcctggcactgttcggcttcgtgttcgcctgctacgtgagcaaagtgttcctggaggaggaggacagctttgacttcatcggcggctttgactcctacggataccaggcgccccagaagacgtcgcatttacagctgcagcctctgtacacgtcggggtagcctctgccccgcgcccaccccggcgcctcgccctgggctgaccgcagctgccgcgagctcgggccaaggcgcaggcgtgtccccctggtggcccgcgctctcactgcagcctgtgcccaaccccgcgtctgcatctggagatgcggacttggacgtggacttggacttggacttggatttgagcttggctcttcgcagcccggacttcggaggagtggggcggggcgggggaggggcaccacgggttttttgttttttgtttgtttgtttttaatctcagccttggcgtgagctggggccttcctctcttctccagcctctccctttcactcttcgcccagcatcctgcccccctgtccaaaaacagcaggacatcaggcccatcccatcccaccacactcactcaccagctctggggaaagctactgtgaactaggagcaggattcctgggttctaatcgcaggtccatcactgactgtgacgtctagcaaagcccttgccctctctgagcctcggtttccgcacctcaagtaattaatcccttagcaaatggactcttttagacttctcatttaactcaattccctgagctagactgggattaaaattctcattttgcagtacattaaaactgatgcccagagatgtgatttgcttgaggccacacagctagatttttggtggaagtgggccttgaacacagtgtactttctgcagtttctgactgtaaaacccagtgtctgctctctgagttccatttccaagcccccctccatcttggacctatgtggtctccaccatattcacacaccaccaccaccacttgccaatgcctctcttaaagcaatatacccattcgttctcttattgggaactggatggatgaagccccaaattcagccccacccacagagaagccttcctacactcagcctctgtccacccttggcaaatctttcaagctctctcctccaggaaagtggggccccaactcagtcactccacccccttccaggtccctgaggctggttctactgtatccccatcacctccacaactccactcacccctgacggctccatccacctcaccagttggaaggcttgtggtttcagagaggagcaatgctggtcagcgctgcccagactccagtgtttacagatcaccagcatttacaaccaatccaatggccagaagcctcctctaacaagcccagaaggagttctgaaggggcagatgggggtgtgagtagtcggggagtcgggattgccagcaccctcacccttccttgggggcaagtagaggtgagaacactttccccacctccctccacagacactcctgaggacgctgcatcccacgcactgcctggtgcgtccatagagagaggatcaggtctcagcatttcatctgtgaaagaggcatggccctgggttagaaaggagggcaggagacatggaggaactggggggcacccagatggtgcagatggtttgcacacctgagcctgtctgtggtgaccattccgctcctctcccactaccctccaatctatcattccctactctctaaggccaaaatatcctgagcaaggctggcaaccccaccccaccatcccaaatgcaagcagccaggcccaggagttcctctggcccccacaggcatggagctcccagctggtgggtacagcttgagaggggggcagctccctcaggctaagctactgcccttcactgggccagccctgcctccagccctcacctctctcaccccaactctcccccaagcccctttctactcaacgggtgtagccactggtgctttgaagccttttgtttttataagatggtttttgcaaggggaccaggttctcttttcactgggaccttgcaaggaggggagtgctctcctggtttctgtgcaggcgggttgattaaagatggtgttttcttctct

SEQ ID NO: 193 - DNA, 1707 bp, Homo sapiens
gcggccgcgtcgacgttgggtcggacctgaacccctaaaagcggaaccgcctcccgccctcgccatcccggagctgagtcgccggcggcggtggctgctgccagacccggagtttcctctttcactggatggagctgaactttgggcggccagaacagcacagctgtccggggatcgctgcacgctgagctccctcggcaagacccagcggcggctcgggattttttttgggggggcggggaccagccccgcgccggcaccatgttcctggcgaccctgtacttcgcgctgccgctcttggacttgctcctgtcggccgaagtgagcggcggagaccgcctggattgcgtgaaagccagtgatcagtgcctgaaggagcagagctgcagcaccaagtaccgcacgctaaggcagtgcgtggcgggcaaggagaccaacttcagcctggcatccggcctggaggccaaggatgagtgccgcagcgccatggaggccctgaagcagaagtcgctctacaactgccgctgcaagcggggtatgaagaaggagaagaactgcctgcgcatttactggagcatgtaccagagcctgcagggaaatgatctgctggaggattccccatatgaaccagttaacagcagattgtcagatatattccgggtggtcccattcatatcagtggagcacattcccaaagggaacaactgcctggatgcagcgaaggcctgcaacctcgacgacatttgcaagaagtacaggtcggcgtacatcaccccgtgcaccaccagcgtgtccaacgatgtctgcaaccgccgcaagtgccacaaggccctccggcagttctttgacaaggtcccggccaagcacagctacggaatgctcttctgctcctgccgggacatcgcctgcacagagcggaggcgacagaccatcgtgcctgtgtgctcctatgaagagagggagaagcccaactgtttgaatttgcaggactcctgcaagacgaattacatctgcagatctcgccttgcggatttttttaccaactgccagccagagtcaaggtctgtcagcagctgtctaaaggaaaactacgctgactgcctcctcgcctactcggggcttattggcacagtcatgacccccaactacatagactccagtagcctcagtgtggccccatggtgtgactgcagcaacagtgggaacgacctagaagagtgcttgaaatttttgaatttcttcaaggacaatacatgtcttaaaaatgcaattcaagcctttggcaatggctccgatgtgaccgtgtggcagccagccttcccagtacagaccaccactgccactaccaccactgccctccgggttaagaacaagcccctggggccagcagggtctgagaatgaaattcccactcatgttttgccaccgtgtgcaaatttacaggcacagaagctgaaatccaatgtgtcgggcaatacacacctctgtatttccaatggtaattatgaaaaagaaggtctcggtgcttccagccacataaccacaaaatcaatggctgctcctccaagctgtggtctgagcccactgctggtcctggtggtaaccgctctgtccaccctattatctttaacagaaacatcatagctgcattaaaaaaatacaatatggacatgaaaaaaaaaaaaaaaaaaaagtcgacgcggccgc

SEQ ID NO: 194 - DNA, 21 bp, Artificial Sequence
  Description of Artificial Sequence:  Synethic Primer
aatcacacccaacgtgcagaa

SEQ ID NO: 195 - DNA, 21 bp, Artificial Sequence
  Description of Artificial Sequence:  Synethic Primer
aactggcagttctggagcaaa
